United States Patent Application Publication US 2024/0180975 A1 - sequence listing, part 6

SEQ ID NO: 2 - DNA, 4708953 bp, Chryseobacterium massiliae (residues 3,139,303-4,708,953 of 4,708,953)
  misc_feature (1)..(10): Whole genome sequence of Chryseobacterium massiliae strain with Accession Number No. I-5479 deposited at the CNCM on January 24, 2020 (UGB 3610)
  misc_feature (52128)..(52227): n is a, c, g, or t
  misc_feature (57176)..(57275): n is a, c, g, or t
  misc_feature (127328)..(127427): n is a, c, g, or t
  misc_feature (264557)..(264656): n is a, c, g, or t
  misc_feature (577519)..(577618): n is a, c, g, or t
  misc_feature (832056)..(832155): n is a, c, g, or t
  misc_feature (1015295)..(1015394): n is a, c, g, or t
  misc_feature (1148193)..(1148292): n is a, c, g, or t
  misc_feature (1240204)..(1240303): n is a, c, g, or t
  misc_feature (1322067)..(1322166): n is a, c, g, or t
  misc_feature (1422620)..(1422719): n is a, c, g, or t
  misc_feature (1441272)..(1441371): n is a, c, g, or t
  misc_feature (1535166)..(1535265): n is a, c, g, or t
  misc_feature (1604409)..(1604508): n is a, c, g, or t
  misc_feature (1841729)..(1841828): n is a, c, g, or t
  misc_feature (2034579)..(2034678): n is a, c, g, or t
  misc_feature (2097389)..(2097488): n is a, c, g, or t
  misc_feature (2122447)..(2122546): n is a, c, g, or t
  misc_feature (2149320)..(2149419): n is a, c, g, or t
  misc_feature (2241640)..(2241739): n is a, c, g, or t
  misc_feature (2418169)..(2418268): n is a, c, g, or t
  misc_feature (2526058)..(2526157): n is a, c, g, or t
  misc_feature (2600368)..(2600467): n is a, c, g, or t
  misc_feature (2645520)..(2645619): n is a, c, g, or t
  misc_feature (2702878)..(2702977): n is a, c, g, or t
  misc_feature (2743425)..(2743524): n is a, c, g, or t
  misc_feature (2769562)..(2769661): n is a, c, g, or t
  misc_feature (2791670)..(2791769): n is a, c, g, or t
  misc_feature (2831479)..(2831578): n is a, c, g, or t
  misc_feature (2892648)..(2892747): n is a, c, g, or t
  misc_feature (2907074)..(2907173): n is a, c, g, or t
  misc_feature (2982010)..(2982109): n is a, c, g, or t
  misc_feature (2998194)..(2998293): n is a, c, g, or t
  misc_feature (3058467)..(3058566): n is a, c, g, or t
  misc_feature (3085967)..(3086066): n is a, c, g, or t
  misc_feature (3104907)..(3105006): n is a, c, g, or t
  misc_feature (3120891)..(3120990): n is a, c, g, or t
  misc_feature (3215008)..(3215107): n is a, c, g, or t
  misc_feature (3325682)..(3325781): n is a, c, g, or t
  misc_feature (3726420)..(3726519): n is a, c, g, or t
  misc_feature (3782267)..(3782366): n is a, c, g, or t
  misc_feature (3825410)..(3825509): n is a, c, g, or t
  misc_feature (3899108)..(3899207): n is a, c, g, or t
  misc_feature (3942556)..(3942655): n is a, c, g, or t
  misc_feature (4030724)..(4030823): n is a, c, g, or t
  misc_feature (4087928)..(4088027): n is a, c, g, or t
  misc_feature (4137347)..(4137446): n is a, c, g, or t
  misc_feature (4183291)..(4183390): n is a, c, g, or t
  misc_feature (4206113)..(4206212): n is a, c, g, or t
  misc_feature (4270010)..(4270109): n is a, c, g, or t
  misc_feature (4346130)..(4346229): n is a, c, g, or t
  misc_feature (4353347)..(4353446): n is a, c, g, or t
  misc_feature (4401203)..(4401302): n is a, c, g, or t
  misc_feature (4438546)..(4438645): n is a, c, g, or t
  misc_feature (4465525)..(4465624): n is a, c, g, or t
  misc_feature (4469805)..(4469904): n is a, c, g, or t
  misc_feature (4473602)..(4473701): n is a, c, g, or t
  misc_feature (4591584)..(4591683): n is a, c, g, or t
  misc_feature (4597196)..(4597295): n is a, c, g, or t
  misc_feature (4620362)..(4620461): n is a, c, g, or t
  misc_feature (4629512)..(4629611): n is a, c, g, or t
  misc_feature (4635880)..(4635979): n is a, c, g, or t
  misc_feature (4654440)..(4654539): n is a, c, g, or t
  misc_feature (4702440)..(4702539): n is a, c, g, or t
  misc_feature (4705724)..(4705823): n is a, c, g, or t
tgaacaacttaaaaattcctaagccatgagtgaaagaatatcgagggaagaactcgtaaaaatatacaatgtagaaattactttttttgatgaactggtgaattccggattgctcaatattcatacagaaaacgaaatccgttatgtgatgtatgaagatttgcccacgtttgagaggtttaccaactggcattatgatctggaaatcaatcttccgggtttggaagtgatccatgaaatgctgaaaaaaatggatgatctgagacagaggaaccgtgaactgatgaataaactttcggcaatcgatggtaattttgttgatagttgatagttgaaggatcatgattgatgattggagttgtgaaaaaataatagatcaatgaagagatcatcatttaattaaatttttcatttagctttgcatcagaaattactgtttatgaatgaagagaaaagtattgttttaaagcctaaaaggaaagacttcgaagaaatatatttcagcggaaatcagggaagtttgtttttttcatcgactaccagaggaaaaacgattacaacgattgtgattgctgttattttactgattgtttttgttttcagaaatgattttaccaaagaaaaagcgggaattttatattttgtaagttttttgtttttgctgtgcgcgttttttctttccgtaagcatcaataaagtttcgagatggaaaaagcaggtttataattacttaaataagcttgaaaactgtaaaatctacgaaatccggtttgatgaaaatttctttaccgtaaatattgatggcgaaaaagaaaccagcgaatggaaagattttacttattttgacagcaataatgaattcattaccgttgaaggaaaatacagctatatgtttcccagaaaatcgatgagtgaaaaagaatacagctttctgaagcaggttttaaagaaaaatatttcagaataagaataaaacaacaaaaaactcagagtgctttgctctgagttttattttatcatgaaatgctgattaatccaaccagcccatttccttcatccagtcgtcgttgtaaatttttccgacgtatcttgaaccatgatcgtgaagaagaaccacaattacatcatctttcgtaaactgatctttcatctgtaccaaagcagaaatcgcgcttcccgcagaatatccgcagaaaataccttcttctttagccagttttctcgcatacactgctccgtccttatccgttactttttcgaaatgatcgattaccgacatatcgtagttttcaggaagaatatcttcgccaattccctctgtaatgtaggtataagcatttcctaagttgatttcccccgtttcgtgaatctcttttaaaatcgagccgtacgtatctactccgattacttttatgtcagaatttttctccttaaaaaatgttccgcaacctgtaatcgtacctcctgttcctgctcctacaacaaaatgcgttagttttccttccgtctgttcccagatttcaggcgcggtagattcgtaatgagcagctctgttggataaattgtcgtattggtttacataccatccgttttccgtttctttagccagtcttttggaaacagaatagtaagaacgcggatcggtaggttttacatctgtcggacaaacgataacttctgctcctacagcacgaagaatatcacatttttctttagactgtttagagttggttacaaaaatacatttgtatcctttgatgatcgcggcaagagccagtcccatccctgtatttccggatgttccttcgataatcgttcctccgggttttaatcttccatctttttcagcatcttcaatcattttcagagccattctgtccttcacagagttccccggattgaaagtttccacctttgccaaaaccagtgccggaaaatcttcacccaaaactttattaagttttacaagaggcgtatttccgatggtttcgaggatgttgtttgcgtatttcataaatgtcttttaaagcgttgcaaagatacggctttcagataattaataattaaaaatgaataattaatactgttttcccaatttcaacccttcaaaactaacctttccaatccaaacccaacctctaaaagccctcaaaaccctctcactctatttatcttcttacgctcaccctctccaactctcactctctccaactttcatactctccaactcaataaggagcttattcccgctatccactgtatcttttttgttacggcttcctgaactacgtccgtaaaccttcagtttatgctccagccgcaacaaaaaaggatgtcgtttctatcggggctaagaatttctcgttatcagaacatttgtcattgcgaggaacgtagtgacgaagcaatctcaactcaaaacgaagttatacttaatattcttaaacccttaataaaacttaatgttcaaattgtagaaaagagaatataattttacaaatctgagattgcttcgcttcgctcgcaatgacaaattccgtcgaataattaatatcaattatacttaatcgccttcaccggagaaatcttactgatcagataactcggaattattagagccaaccctgaaataatcagaattccggcagaaattgaaataatggcaatcggattaagatctaccggaactgtacttacgtaataattttccggatttaaggtaatcactccaaaaactttctgaatcaaaagcagtccgagaccaatcgcatttccgtacagcaatcccggaatcataataattaaagtataattgataaaagtggctctgatctgtgaattgcttgctcccaaagtctttaaaagaccgatagaatttgttctttcaataatcaggatcagaagaaccatgatgatattaatgactacaacaatcagcatgatgatgataatcagagcgatattcgtatcgaaaatactgatccagtccgtaatctgaggatatttttcagtggctttttcagcataatttttataaccgatgagtttctcaatttcaggaaaatcgctgtcgatatcatttacatttttaaagaaaatatccagtccgcccatttcatcaggcttcatatcctgaatttttcttacatgattaattcctcccaacacaaactgatcgtcgatcatcttaatatcggttttatagattcctaccacttcaaattttctgtaaataggcttttgatctgcctttgaaaataccgttacaatgctgtccttcactttcagatgaagatctttggcaatcttctgggaaatagtaactccgttgtaatagccaacttccgtaactttcggagaagttccggcaaccagaaattttttgaaccttacactgtcaaaatcttttccgattcctttgaaaataatccctgcaaaattgtgctcgttccgcataattcccgttaccgtagcatatttctgcacactttccacatccggaagttcttttattttcttgatattcagtccctgattatcaagaacggaagtgttgtaggaagagtttgatctcgtagatcttacggtaacgtgtccgctgaaatctgcaagtctttccttaatcgctttcttcgagccgaatccggtggaaaccgtaatgagagaaacaataattcccaatgccacagaaagtctgccgatgaagatgataaccctcgaaaggttatttttgttatctttggaaaacgctatttttttcgagaaatataaaggaaatttcaaacttatgaatttagatttcaaaattaaaaatttacttcttatttgcctaatttttttaggagtattcaatcaatattattctcaggctcaagataaaaaagattttaaaacgggagcagatcagccggagctctatttgcctttcctgaaaggtaaaattgtaggagtggtaacgaaccagaccggactgatgagcgataaaacgcacgttgtagattttttggtaaaaaacggaatcagaataagatcaatcttcgcgccggaacacggtttcagaggcgatgcagatgcaggcgagaaagtaaagaatggagtagacgtgaaaaccggaattcccatcgtatcattatatggtaaaaataaaaaaccgactccggaacaactgaaagaaatggatgttctggtgtttgatattcaggatgttggtgtgaggttttacacctatatttcaacactgacctatcttatggaagcagccgctgaaaataatattgaagtgattgttctggacagacccaatccgcatgacggctacacagacggtcctgttttaaagaaaaaatggacaagttttgtggggatgcacgaagttcctgttgtatacggattaacaataggagagtacggaaaaatggtaaatggagaaaaatggctgaaaagcggagttcaggcaaaatacacgttgattccgatgaaaaactatcataaaaagctgcgataccagatttcagataagccgtctccaaatttacccaatgataaagccatcaacttatatccaagtttatgcttttttgaaggaacacaggtttccgtgggaagaggaacagatttaccgttccaaatctacggatctccatggacaaaaaatcttccttatcagtttactccgaagccaagtgcaggagcaaaagatccttttttaaacggaaaattgtgctacggcgaaaacctttcagattatagaaaagatttaacagagctgaatctggaatgggtaataaaagcgtataaaaactataaaaatcctgatctggactttttcctgaaaccaaccacaggaagtaatttgtggtttgatactttagcaggaaccgatgagctgagaaaacagattgttgccggaaaatcagcttcggaaatcaaagcatcctggaagtctgatttggaaaaattcgaaaaaatcagaaagaaatatgttgtttacgaaaactgatgaaatatgaattgtcaattgtcaatagtgaattcattttatttgtgaatctaaattgacaattgacaattgaaattttttaatcaaaattctgcggcggagttttgtcgtcttttcctttattcatgatcacaagaccgattgacagaccgataacgcccgctgccgcaatcattaaagctctttccagtttatctgcctgatcgtttcccagataattcatcagaaaaagaatcccgaaagtgatgatgcagataataatatgatttttaccgaatagtttcattgttttattttagtttataagaaatcatgataccgcctctgtaaggaagaatttccccgcttttgttaaagccttccgctacgtcataccgagctcctgtcgagcgtacatagcctttgtaaaaatcctgagaagttccgattcctgcataaatatccatgttccagttttcagcaagtttaaactgatagccccctgtaattcccaatattatagaatatcctttttgatatatatcagaatattggtagacatttccatttttttcatcaataaaagtgccttcactccagtaattccacttttgggcaataaagcgggaacctgcaatattccctccgatataccaatgtttgaaggcttcatcaaaataatatcttccttccagcgaaaccgagtaatactgcaattcgtgtccggcaaaagatttccacggagaaattaaaacatctccctgtaccgtgaattttttatttaactgatgctctaatcctacatttataactcctacaggtattagcaaagcatttcctttaaggtatacacttttttcagaagtctgttgtggttcctgttcctgtgcattgagtgttcctaaaaaaaacacggttaaaatccctgcgatcaatcttattttaagcattttattttatttgttttagaagctcatcggctaaagtagaatctttctgagcctgtgtcgccatatttttagacatttctgcgtatgtttttgccatttctttatttccggttagaaaataaagtttcgcaagaatatatgtgttttcggaactttcgcctctcatcacagatttttcagcccactcggcagcttttttcagagatgatggggtttttacatgttccgcaaatacccatgctgcttttaataattcattaggttcaaacgcttctgaatttctgtaataggctaaagctgctttctcgtattccggaaaattcgaattttgctcataatagccaagtttcatctggttgagtttcacttccgcatcatgctttcctacaagaggttctgcatttttcatgaagtaatcatcattgatttttttattctgctgatcgatagactgctccacaatcttgccaagcttgatctgattgtcaaattctttatacgtttcttccggtaaaaatttgatgatttcagcttttctgtctgcgaaaactttgtaatttttgtcttcagtagattttaagaaaaacaataacaatccaacgtcgtcttttgagaattcttcagtggcttttttattttcaaaatatctttcagatgcctgtttggcaaaattaaaatccgaagaagaattgagtttcataatattgatcagaaaatcgggatctttttcacccttcgcaaaacgttctttcagcgaaccttttttattgttaggagaatttacatcctgtgccatcgtcagaaacatactttcttccatgtagccgaaattctgggaaacaagctctccgtcgccattcagaaaaagataagtaggataggagcgtactccgtattttgccgcaatatctcttccttctcctttttccatatcaaatcttgcgttcacaaaatttgcattgaaataatctccgaccgatttctgtgtaaaaacatttctttccatcattttgcacggaccgcaccatgaagcataggcatccagaaaaacaatctttttttctttttttgcctttgcaataaggtctttaaaaggcagttcttcaaatttaatggcttcctgagcaaatgccgtaatggcggaaaataacaataaaccggagataatcttcttcatttttcaaataaaatttaaaaaagcgaagatacttaatttcaacgtaaaggagatgctattgtgatgggattaactacgatttaacaatgtgaaataaaaaaataaaaaagtcatcccaaatgagatgactttaagtggtttctccaggaatcgaaccagggacacatggattttcaatccattgctctaccaactgagctaagaaaccatttaatttttgcttcttttttgaagtggtgcaaaagtaataataattattaaccttggcaaattttatttaaaactttgaaaataaaaccacctttttacaggtggttttttaagtggtttctccaggaatcgaaccagggacacatggattttcaatccattgctctaccaactgagctaagaaaccattcttgttacttcgttgttttaaagtgatgcaaaagtagtaagttttagtatatgaagcaagtattaacaagactttttttaacaaaacttaaaaacctactgattttcaaccgaattattttcctgttcgcgtcttatctgttcgctcatttcctctaatacaggtttaatcgtgctttccggaagatcacttattcggatatacatcagtccgtcgatcgcatcattgaagttgggatcaacgttaaaagcgataactttcgcgttctgcttgatatattttttaattaaaacaggcaatctaagttctggttccagatcatcaatgattttatccagcttgttaagatcagattccatttcttcaaaaaacagatgcttgtccctgtcgcgaagctttactttgtattcgtttcttggagtaatatactgtgcaactgcggaatcataataattcgaacgcataaactcaatcatcagagattttgaaaactctgaaaacttattggaaatacttacacctcccatcaaaaatttatgatccggatttcgtaaacagacatgcacaattcctctccataaaaggaaaagcggtagcggcttctgctggtattcctgacagatataagcacgacccatttcaatcacttttttgaaaaaaggatgaatgtcctgctcgaattcaaataaagaactggtgtaaaaacctttgatgccggatttcttcatcacttctttacccaaagccattctgtaagctcctacaagtttttcagcggcactgtcccaaagaaaaagatgatgataatgtttgtcgtattcatcaaggtcgaacggcagattacttccttcacccactgcacggaaggtaagctcacgctgtcttccgatttcccgcataatagaagggatttcttcgtaagtggtaaaataaacttcgtaatttccgttgctgaaaaacatcttatctgtgcctttcagtttattgatgtcttttaaaatatcttctttcggagtttcgtcgatgatattctgaacgatattttcttctcttagtaaagggaattttaccgaaagatttttaagattgatactttgcgccaaagattttctcttttcgtagtaagatttcatcatataaaccttacgtttcagaaattctcccagttcttcgatggtttccatatcatccatcgcctttacggtaataggttttccgattcttattctgatcggtttttccctgtcgttcatcatttctgccggaagcatcaaggtctgcaaattaggatgaattttcgctacctgataaaatatcctgctgttttttgcatgaaaatacataggaacgaccggcacttttgccattctgatgagctttaatgccggtttttcccattctttatccagaatttcaccgtaaggattgttcttattggaaacttctcctgcagggaaaattcctacacagcctccattttgcaggtgctttaacgtttcccgcattcctgaagagctgctgtatgcttcttttctgccttcaaaagggtttacagcaattacgtacggttccatcggcttgatcttttccagaaggaaatttcccatcactttaaaatccggacgcacttcagacagaactttgcacattaaaattccgtcaatcgctccaagcggatgattggataccagaataaacggtcctgttttgggaatttttgccagatcttcttcaaaagcgatatagcttaagttgcgctctcttacaaatgagtcgaaaaagtctttgccttccttgtcttttagtttgtcgtataatttatttacttcgtttattttagcaatgctcatcacagcagatgctacaggattctttaaaaatcctattttacttaagccggaagcctttatcagatcgtttttcgaaattaaactcatattgtgtttagtcgcaattagtttttattgtgttaccatttgaagcgtatttttcgcaatctgctccaataatacacttttttcctggtaaaatttatctatgttctctattttcgcatttcttacggtaaataaagatacattttttataacttctgttttaaatactttttgaagttcttcatttaattcatctacggtattgaatttatcttcaagacataaagccaatgaaattgcagaattctgcatcagggaaaccttaattttgtacttggataaatatccgaaaataagactcatatggtcttctgcgataaatgaaaagtctcttgtggagattttaagcaaagtctggttttcctttaaaatataagattcttcgctttggtttttttccgaagcacctacttttgttccttcctttgtaggatctacaaaagattttacgtaaaaaggaatgtttttctgctgaagcggctgtaatgttttagggtgaattacacttgctccgtaatacgccatttcaatagcttcttcataagaaatattagaaagcaacgtcacatctttgaattttctcggatctcccgtcattacgcccggaacgtctttccagatcgtcatagcctctgcatttaagcaatacgcaaaaatcgcggcagaataatcagaaccctctcttcctaatgttaccgtaaaattgttattatccgaaccgatgaatccctgcgttacgtagcagatttctttatttaagtttgaaataaactcttccgtctttgcccagtctaccacaccttctctgtaagaattgtctgtctttacataatctcttgcatctagccactgattggtaaactgaatttcattcaaatattcgctcacaattttcgtagaaatcatttctccgcagcttaccacctgatcgtaaacaaaatcgtagttcggagatttgtttcttcttaaaaaagaatcaatatcatcaaaaaataaattgatttccgcaaacaccgcgtgattttcgggaaacagtccttccgcgatctcgatgtgttttcgttttatcttttcaatttcagtttgatagttatccttcttgaaataaagttctacaaccttttccaactcatttgtcgttttgcccatcgctgaaattaccagcagacatttggcaaatccctggctttttaaaaccatggctacattttttacactttcggcatcctttaccgatgctccaccaaacttgaaaattttcattaaattgttaataataaaattgttagataaaatttgtgggaatattttacgggtgacaaaattatacatttacaacgagatatgaaagagcagaatatcgctgcaggcttaagattttattaaaattatcaattaggagaaattattccgattgcttcaataaaacgggaggcgtattttaggataaagattttttaagatcgatgtgtttgattgtatttaattgatagacagtaattaaggtcttttattaattattcttttaaattgtaataaattttacgaaatttggagaaaacgtaaaaagcaaaatatgtcagagcaaccattacagactttaggagaatttcttattgatagacaggatgattttcagtattccacgggagagttttcccgtctcttgagcgcaataagactggcttcaaaagttgtaaacagagaagtaaataaagcaggaattgtagacatcgcaggcgctgcaggaaaccagaatgtgcagggagaagagcagcagaagcttgatgtaattgccaatgaaatttttattaccgctttgtctcagagagaggttgtctgtggaatcgcttccgaagaaaacgacgattttatcgatattaaatgtggcgaaaacggacatttaagcaaatatgtggtgctgattgatcctcttgacggttcttcaaatattgatgtcaacgtttcggttggaaccattttctcaatctacagaagagttacagagcccggaaccccggttcagttggaagactttttacagaaaggcgttaaccagatcgcggcaggatatgtcatctacggatcttccacaatgatcgtgtatacaacaggaaacggagtgaacggatttacattagatccttctctgggaacctattatctgtctcatccgaatatgactttcccaaaaacagggaaaatttattccattaacgaaggaaactatatcaaatttcctcagggcgtaaaaaattatcttaaatattgccagatggaagaaggagatagaccatatacttcaagatatattggttcgttagtggcagattttcacagaaatatgttgaagggcggaatttacatctatccttcatattcgcaggctccgaatggaaaactgagattgctatacgagtgtaatccgatggctttccttgcagaacaggcaggagggaaagcaacagatggcttcagaagaatccttgaaattgaaccgacagaattgcatcagagaattccgtttttctgcggaagtatcgatatggtggagaaagcggaagaatttatgcgaattgacagtgtaaaataatgaaagcagaatattcaagatatttattagaattcaaacgcccgagtggaacatctcgcggcgttttgcttgaaaaagagacctttattctcgaaatttcagaaaatggaaaaagaggaataggggagtgtgcgattttcagaggattaagttttgacgacagaccggattatgaagataaattaaaatggctttgtgaaaatattcagcaggaatctgagtttttaaaagaagaactgaaagaatttccgtccatttggtttggttatgaacaggctgttctgaatttaaaaaatggtgaaaacctgtatttcccaagtgaatttacagaagggaagactccgatcgtcattaatggtctgatctggatgggcgacatcaattatatggaagaacagattcaggacaaactggaaaaaggttttcactgtattaagctcaaaataggagtcaactggaaatccgagcatgatattcttcagaaactgagacagaagttctcaaaagacaggcttgagcttcgcgtggatgcgaacggaggttttaataaagaagaggcaaaagttgttttgcagcaattagccgatctgcatattcactctatcgagcagccgataaaagcaggaaactggaacgatatggcagaattatgctttcagactccgactccgattgctttagatgaagaattgataggaattgtagatttagaggtgaagaaaaaacttttagaagcaataaaaccacagtacattattttaaaacccgctttggtaggcggtttttccggatcagacgaatggatttctctcgcggaaagtatgaatatcggatggtggatcacttcagctttagaaagtaatattggcttaaatgcaattgcacaatatacatttacaaaaaaaagcccgatgccgcaaggattgggaaccggagctttatttgttaataatttcgattcaaatctggatctgaaaggagaattactgtggtttaaaaattagatttcacaaacaggattgttgtaatgttcttcatcccatgttctgcagcatcttaatttaggattccagttaagacagccgataggaacaatacctcctttgattgtttttaaatcactcttcttaagtttttttagatttttcatagaaacatttttttggttttgtaatgtaaatatgaatttcttttatttaatgtacaacaactttaacttatattaacacacattaaagtgaattaatataagtgaaaaaagaatataaaagatttgcaaagtccgtatgaactttgcgtaacttttggaaattgttttgagatttttaatttgtagttttcagtcgtataatcttagtgtttataaattaggtgattggcgattagataacatcttttacaaaaatcgctttcttaatgtattctaaaaataaagaaaacttacttttaacctttttcataatataaaatgttaatatttttgtggtaataaatttacaatctttatgccaaaagtcaatgcataatttttatttttttaacatttttctttaataaattgtaaactgttgtataatagctgtttggagttttttttcttttatttttacttttacaggtataaatttcttttattttgttaatttttagaaagtattgatgttatttttattcgaagagaatacctcgaggcttgcctcggggtcaaagcggaaaagtttgaaaaatggagggtttttcataacattttgaaaaagtgtaaatttgatctgtggatgagcatatttacaaaagacacaataagagcttgcttttataccatttggtttttccaatgaaatataggagagaagttttaacaaaagagataggagagagtcttcaattcatttgtgttggaatttcagaacgttacgaagttcaatttgtagagattggatatgagtcggatcatgttcattttttagttcaaagtgttccaagcatgtcagtttccaagttagtaacgattataaaaagtttgagcgcacgagagttatttaaaaagcatccagaaataaaaaggattttatggggagggaatttatggacgagcggttattatgttaatactgttggtcaatatggaaataaagatgttatacggaagtatattgaaaatcaaggaaaagaaaaagaatataaaaaaatccacggcgaacaactcaagctatgggattgaccaatacctcgaggcttgcctcggggtagtttatttgaaattttaatatctgcaaaaaatataacccaaaagaaatgcaaatccactgttactcttttgcattattatttccataaaccctcaaaatttcataaatttgcaaattgccgtattatacagcaattaaaagcgaaatttaatggaagaagaaaaaaaatcactcaattttattgagcaaattatcgaagatgatttggcaaacggtctgggaaaagatcagctccgtttccgttttccgcctgaaccaaacggttatctgcatgtaggtcatacaaaagcgatctgcatcaacttcggtttgggtgaaaaatacaatgctcccgtaaaccttcgtttcgacgatacgaaccctgaaaaagaagaacaggaattcgtagattctattatgaaagacgttgaatggctaggtttcaaatgggataaagttttgtacgcctccgattacttccagcagctttacgattgggcagttcagttgataaaagaaggaaaggcttacgtagatgagcagccttctgaagtgattaccgaacagagaaaaaatcctgcagagccgggtgtggaatctccatacagaaaccgccctgttgaagaatctctggatttattcgaaagaatgaaaaacggtgagttcgaaagcggttctatgtctcttcgtgcaaaaatcgatatgacttcaccgaatatgaacatgcgtgatcctgtgatgtacagaattctgaacaaacctcaccacagaacaggaaccgattggaaaatttatccgatgtacgactgggcgcatggtgaatccgattatattgaacaaatttctcactcgctgtgttctttagagtttgaaaaccacagacctttgtacaactggtacttagatcaggtgtacgaagaaggaaaagtgaaaaacaagcagagagaatttgcgagaatgaacgtttcttacatgattacttccaaaagaaaactacagaggctgattgccgaaaatgtagtgaacggttgggatgatcctagaatgcctaccatttccggaatgagaagaaaaggttttacccctgcttccatcaggaattttattgaaaaagtaggagttgccaaaagagaaaatcttattgaacttcagttactggaattctgcgttcgtgaagaccttaataaagtcgcaaaacgtgtaatgacggttgtggatcctgtcaaattagtcattgaaaactatccggaaggaaaagaagaatggctggaaacagaaaacaatcctgaacaggaaaatgcaggaacaagagaaattccgttttccagagaattatatattgagcgtgaagactttaaagaagaagcaaacagcaaattcttcagactaaagttaggcggagaagttcgtctgaaatctgcttacatcattaaaggtgaaagagtagaaaaagacgaaaacggaaacattacgaccatttacgcaacctacgacgaaaaatccaagtcaggaagcggaacagaagaaagcttaagaaaagtaaaaggaaccattcattgggtatctgcgaaacatgcaattcctgtggaagtaagaaattacgacaaattattcactgtggaacagccagatgcagagaaagatgtcgatttcctaaactttatcaatccggattctgtaaataccattcagggatttgctgaaccaagcttaaaagatgtggcagttggagaacctcttcaattccagagaattggctatttcacgaaagatcaggattctacggatacaaactttgtattcaacagaactgtgacgttaaaagactcttataagccggagtaaaaattcattgatattatataaatgaacagggcttatttttaagccctgttttttgtttttaaccctaacgaaacaaaaacgataaccaaaaaataaggttatccgtgaaaagcatttgcgtcattcgtgtttaaaaacagtaattaaaattaaaaattgtgaaacttataaacttatataccaactcattcaaagggctttcaaaagaaagctggatgcttgctttggttatgctcatcaatagggcaggttccatggtgcttccttttctgggagtttacatgaccgatcatttaaaattcagtatcgaaaatactggagttgtactcagctttttcggaatcggttcggtaatcggttcctggctgggcggatttattacagacagaatcggggaatacagagttcagtatctcagcttattgctcagtgtacctttattttgtatgattcctctattcaaaacagaaataggagtggcgaccattattttgctgcaaagcattgtaagcgattccttccgtcctgcaaactcggttgccattacaaaatatgcgaaacccgaaaatatcaccagagcattttccttaaaccggatggcagtcaatttaggattttccattggtcccgctttgggcggtattttatcggcaatttcctacgaatttttatttttcagcaatgctttcacggctttaattgccggaattttatacatcgtctttttcagaaaacgaaacattctggcaaaactaaaagcccgaaaagtacaggaagccatagaaattaaaaaagaaaattccccttaccgcgatggtaaatttctgatttactgtttcttctgtatgttgttttcaatctgtttcttccagttgttcagtacgctgactattttttacaaagacacggcgcatttaagtcagcaaagtataggatatattttgggatacagcggctttttagtcgttttactcgaaatgggattggtacaggttgccgaaaaatatttcagccttgccgtaaccatgcttttgggaaccttcatctgcggatttgcttatgccatgcttggttttgattacagtatcgtgactttggttgtatccatgagccttctctgcgtaggagaaatctgggctttgccgtttatgtcaaccatcacggcattacgctccggaaaaaacaacaaaggagcttacatgggcttgaacggaatttcattctccatcgcctttattgtaacccctactttgggaacgttcatcgccgaaagattcggatttaccatattatggatcgggacaggagttttagccacaatcattgccattgcattttattacattgttccctggatgattggcgacagaaaacacgcagaatcttaaatattttgggcgtgtccctcattccggagctaaacctcataggtttttaaaacctatgaggtttcaccttacaattcgggtcgggctgctttggggttcgcttcgcttccgtactcgttcgttcctcactcgcaccggcgccttcgtcgccgcccgacgtatccctcacgcgaaggaagtcgttcatagaatttcagtccgtcacagaaaatgttgacggactttttattgtaacggagtaagaaacaaatttggctttagccaaaacgcatcatcaatttcttctgaagcccaactcacggtattttaaacaaatcttctgcgaatttatattttccacacagaaaagtacagtttttgcttcccttcattcgatgacaaaactctgctttctattttcattatgttccgtttccctactgttttctcaagaaagagattctgcagcactgatttcagaagtcagaatcgatgcctacaagaaacccacaacttttatttcgtccacaaaatcggttgctgtagtttcagaaaatctgcttaaccagaatacacccgaaagaatgctcgaatccatcaatcagattgcaggagccagaatggaagaacgttctcccggaagctacaggatttcccttcgcggaagcactttgcgatccccttttggcgttcggaatgtgaaagtttatctcgacgattttattctgtcagatgcttcgggaaacacttattttaatgttgtttctcctgaactcatcaaccggatggaaatatataaaggccctgaaagcggagattatggcgccgtaacgggcggaactgttttgcttcagaccagaaaatcagatcagatttccgcaaatttagcggtcggaagttatggaacttttaaccagagttttgatctttccaaacacattgggaaacacttttttcaggtttttcagaactattatcagaccgattcttatcgggaacagtcaaaggttcagcgaaagcagatttttgtaaaagaccattttcaatattcagaaattggattgctcaaagccatgattttatacgctgatctcgattatcagactccgggaggacttactttagaacagatgcagatcagccggaaacaggcaagacctgcaaccaaaacagtttcgggtgcaaaagaacaggatgccggaatccgcaataaaatgattttggcagggatttcaaatgattatcagttcagtcctgatttctcccatttcattttaattcagggttcttacgtagattttgaaaatccgtttatcaccaattatgaaaaccgttttgaaaagaattttgcattaagaacgcatctcaattacgaaaaaaactggaataccatttcattagcctaccgattgggatttgaaggcggaattaatgatattttggtcagaaattacgataataacagaggaacagaaggaaacccgcagaatttcgatcagattaaaaatacttcaggatttttctttctttctcagaaactgaatgtcagcgaaaaattattcaccgatctttccatcagtttaaattcaaattcttacgactggaaccggatatatccccgaaatgaagaaggaaaagttcattttaaaaatcaatggctgcctaattttggtttcacctatcttttgggaaaaggtttttctgtgcgcggaaaaatagggaaggggaattttgcacccacgaatgaagaaatccgctcttcgaatcagcagtttaatacaaatttaaaacccgaattcggctggaacaaggaaatcgggattcggaaacaattcggtaactccgtttttgtggaaggaaattattttgatttccggatgaaagatgcaattgtgaggagacagaacgaagccggacaggaatacttcgtcaattccggagaaaccgttcaaaaaggggttgaaattttaatggaatcgaagaatttcaatctgaaaaacaactttttaagccatttcagattcaggttttcgggaagcttttacgattttacatttaaaaattatcagcagagcggaaataatttttcaggaaatgaaattaccggagttcccaaaacaacaattaacagtttgctgaattttacgtttttcagaaaactttcggtagattattcccatttttacacgtcaaaaattcctttgaatgatgccaattcagtattgtcggaaccaagtttggttgggaatattcagttcagatttcctgtacattttgaaaaaacgagagtccgtttgtatcttcagattcagaatctttataatacagaatatgttttaggttttgatatcaatgctttcggaaaccgttattataatccggctgccaaaagaaattttgtattgggaataaaggttgatttttaatgtcattgcgagaagcgaagcgacgaagcaatctcatgttattgtgcacaatttgtaatcattaaaaaactttggattatttgctgggtggaaagtttatactgagcttatctaaaactaaatgtatgattaattaaagataaataataaaaatagataaagattgcttcgtcaagttgttcctcgcaatgacattatttcgaaagaatgtttttcacaatcatttccgcatgaattctggaattttcaataaaccagagatgtgtatcttttcctccgcaaactacacccgccaaatataaattcggaacattggtttccatggtttcaggatgataaagcgggttcagacaatcgccctgcaattcaattccggaattttttaaaaaatcaaaatcaggaagatagccggtcattgcaagaacaaaatcattttcaatttcctgcaattcacctttttcatctttaaaaacaacggaatgttgtttaatttccattaattcggcattgaaataagcagcaatacttccttccgcaattctgttttcaatgtccggtttcacccagtattttacactttttgaaatctcggaatgtcggataatcatggtgacttccgcgccttttctgtaagtttccaaagcagcatcgaccgccgaattgctcgaaccgaccacaacgattttctgttttgcgtaaggataaggttctgtataataatgtcttactttgggtaaatcttctccgggaatattcatcagattcggaatatcatagaatcccgttgaaataatgacgtttttcgcggaatattttcctttcgatgtttcaatggtgaaaatttcattatctttggaaactttttctactttttcatataaattgatgttgatattccgctgtcttgcaattccctgataatattccagcgcttcctgtcttcccggttttggtgctgttgaaataaagggaattccatcgatttccagtttttcggcagtcgagaaaaaccgcatatacaaaggataattgtacagagaattaacgatggttcctttttcgataacccgataagaaagattatttttctgcgcttccagtgcacagttcagcccgatcggtccgcctccgatgataagaatatctaaaatttccatacaacaaatgtaaggaaaacccatcaacaaaggctttttcagtaaaagcaaaaaactattcttttcataatgaccatctattcgaaaaatatgaaattccttcaacagtaaactttcaaaacgattctaaaagcatggcatttattttggtaaatgataatcagacattaaaaacatgaaaaaaataatcatttccttgctggttttatctgcggttgcgtgtaagaagaaccctgaaaaattcgttaatgatgaggttaatgctaaaggcaaaaccattacggatagttcaatcagtagtagaacgaaaattaccaaagatcaggctttaaaaaagatcaatgaggatattatacaggctttaaaggataaaaactttaagaagtttgcggaatttattcaccctgaaaaaggagtccgtttttcgatgtacgctttcgtgaatccaaaagaagacaagaaattttcaaaagcagattttatcagatatcaacctaccaaaacacttttcacttggggaacaatggacggttccggagatctgtacagagcgactatccatgattatttagcagactgggtgtactccaaagattttgcgaccgcgcaggtttctttaaatgagtttcagggaaaaggcaattctttgaataatgtaaaggaaatttatccaaatgcagattttacggaaaatttcatcaaaggctcagaagccaactccgaaatggactggaaatgccttcgtctgatttttgaagaatttcagggaaaatattatctgattggtgttgttaacgatcagtggacgatttagaataaattaaaaaaatcgacagatttagtgcgatgttgcgaatactcagtgtaatatttaaacaatatatgattgttaaagatgattttcattgagaaagaagtttgacgatcctatgtcattctgacgaaggaagaatctcataaatatttgttttataagtaactgaattgttaataacttattctgacaaaaaccttcgacaagctcagggtgacatctctaatactaacataatgtgatgtcaatacagtacgttaatatgtaaaatcttcgtgattataaaatttccgccagttttttagttaaattttttcttgaaaactgctcaatattctgagtgttttccgaaagatttccgtatttccaaagttcaaatttttctaaaataaactctttaatttttccggaatcatcataactgaaatgttttccggcttgtgtttcatttaaaattttcgaaacatccgcatctttgggtccaaaagaaatgatttgctttcctgttgccagatattcaaatatttttccgggaatgatccctttggaagaatcgttcggaaagttggtgatgagcagtatttccgaagtctgcatttcttcaatcgctttgtcgtgagaaagatatcctagattcagaatatgatttttcaggtgtgaatgttctattgaattcagaattttatcatcaattcttcctgcaaatttcaaagtaaacttttcagcgaattcttcattttctgtaaccagatcattcagagctttccagagattttcagggtttctcaactgttctaaaactccgatgtaacttaatgtgaattttgcttgaatgttggaggatttaagtgtttgagtgtttgagtctgactcgtcaaaaccattcgtaatacaaattgcattcgctccgtttttacggaaattttcagcatcggtgtagcttgttgccaaagtaatatctgcatttctgaacacttcgctttccagttgacggtgcttttgatcggaacttttggtcagttttaggtgtttgtaataagagatttctgtccacggatcacggaaatcggcaatccatttcaggttgggaagtttcttttttaaatttaaaccaattaaatgtaaagaatggggtggtcccgaagttaccacaacctcaatctgattttctgttaaatattgttccagaaatttcacggaaggttttacccagaagactctcgcatcgggaatgaaaaaattgcctctcacccaaatcgaaagctttgatttccagctttgatttttaccgacatcaaactgccccgctttaaattttttgttgcttttgttcagcttttcagccagttggtaaggttccaagatttttgtttttacaatttccagatctttcggaacatctttcatcaaactttcatccagcaaaggataactcggattttccggtgtataaatcacaggtttccatccaaattctggtaaatattttgcaaatttcagccatctctgcacaccgggacctcctgcaggaggccagtaataggtgatgatgagtattttttttggttccattaataatgaattctgttgtcattctgaatgaagtgaaacggaatgaagaatctcatttaatttcattatccagcaattttcagatcggattgaatttctaaatcttttccatttgtcttttgtctcttttgcggtaaagaaaataaattccgacgccgctcaaaagaataaacaaaccaaaacagataagcgagatccattttcctttttcgataacttccggttcgaagaccattctcacgttgtgatttcccgcaggaacgtgaacggcacgaagaagataatctgctttgatgtaaggaacttctttttcatcgatgaagaatttccagccgtgaggatagtaaatttcagaaaaaactgccaattgcggagtcttggactgcgatttaaattccagttcgttgggttgatatttcgttagattgataaacgctgttgagtctgcctgaacaggttttccgtcaaaatattttttgtcatctgcggaaataacggcggttcttttgctgttgatggttccgattgctttgatttcctgattcggagattctacgaatttaatatcgcttacaaaccatgcgtttccgttggcttttggattcggcattgcctgaggctgttccggaccgcctaaaaccaaatattttgcattcagaagattcaggatattcggaacttttacagaatccatgatctggaaatattcgttgattacatcatcgtaccttctcagttttactgcatgataacctccgatagaagatttgaaataagaagtgtttgtctcgctgaatgttcctaaaatattgttgaaaattctgtaatgcgtcttatctttttcggcgatggtttctaatgttttgttcacatttacattcgctaaaattggctccagatttggatttccctgaactttttcagccataagatcggagctttccgtctggaaaggattttcggcaaagattttatcaacataattatcatcgttcaggtaacgcttgttaaccgtccaaagatcgaataaacttactactccaataattaccaaagcgatattctgattcagcttttgctttaagacaaggaataaagcagcaactgcaatcgcaacataaataaatgctttaatggcatcgattctgaataatttaaatctttcgtcaataagataatccaacaggaaaggaggaagataagttttttcgttctcggtatgaaatcctaacagagattttccgaaaatcagtaaaatcaatacaaatcctaaagttccgccgcctacgtaaagaagtattttttgtttgtattcctgtgtgagtgttttatctgtgaagaatctgtataatccgatgatcgcaattaaaggaaataataattctacaaccaccaaaatagaagaaggtgctctgaatttattataaaaaggcacgaaatcgataaaaaagtcggaaagtgccatgaaattacttccccaagctaaaaatacggtaagaatagaagctcctaaaatccagtagcggtattttttccatgcgatgaagaatcctaaaagcgcaagaaaacaaacaatagctccctgataagcaggtcctgaagttcccggctgatctccccaataggttagattcccgaagcctttggaaattctgtcatattcagcttgtgagcttacgttttcctgaaccaattcctgaattttagccatcatttcctttccttccggttcctgacttccgcctcccattaatctcgggatgaaaaggtttaaagtttccagttttccgtagctccacatcagcatactttctttatccattccggaatctccgcctgtaatgctgctgttcgtaaggatctgttttccacgaacggtttctttgatgtattctgaattcgccatgattctctgagaattcattccgactccgattaaacatgaagcggcaacaattccggacgaaatcagaaagtgtttcattggcgtttttttcagaatacctcttatcagctcagaaaggaataaaaatcctaacgctaagaaaagataatacgtcatctgtgggtggtttgcagcaatctgaagccccataaatagggtagtgacaatgaagccccaaatatattgtttccggatgtagacaagtaaaattcctgctaagagcggtgcgaaatattcaatggtattgatttttccgttgtgtcccgctgcgatggcaatataaaaataggtggaaagtccgaaaaaagtagctcctaaaagggcatatttccagtttcttaccacaaccattcccaaaaggaaaaatcctgcggaaagaagaaaaagataattaaccggtcttggcagaaaattcagtttggaatctatttttttgatgatgtctccgttaaactgacttcccatctgatacgtcggcattcctccgaacatggaatcgctccagtaggtttcttttccggtatcggctctgtaatcgagaagctcttttgcaccgcctcgatattgaacgatatcatgctgaaaaagctgctttcctgtaaaaacaggagtggagtataaaaatgctaaaacgataaatacaactaatgaaattgcaatataaatcaggtttttatttttcgccatgttgatggttattatctaaatatttttcggaattgttaccttttattgttgttttcttttacctcttcataatcaacggtttctgcatcccagttgatttttttctttgtattgtctgagtttttaatatcctgctcccttctgttttcatttctgttctggttaaacagatagctgtgaaattttttgaaaaagattctcttcaaaatattccaaacaaaatagatgataatcgttgcgagtacaaactcaaaaatatgtttcatcataataaaaatatttaaggtttaatgctcaaagcctctgtaacgctttgacatttcaactttaaacgttctgctttatttcgcagaaggatttaccattacagaagaattggaaacactcgtcatagactgagattcttttcctctggaaatactttcaatctgtgtcgtttttacagaaatattctggtttttgatccatcctgtattctggtcaaacgtaatcgttccgttttgcgtaagttccgtgcttaagctgtgcgtaacatcaccctgattttccttattaactttctttggaatccctccggttactgaaatttcagccactccgtttcctacacttttcagaatatagttagatgtcactttaattcttccctgtgcatcagcattttcgctgttcgtccatttttcgccgattttcgcaccttttttagggataatcgttaaatttttattgaactgatctttaagaactttttcgttaaaagattccttaagacttgcaactacgctttctttctggtttttatctttaatcagtgatcctacagaattggcaactttactgtaaacagcatcaaaacctgtaatagaaattacatttcctttggtatccatcttcatgttcagcttatttccggtcaatgctctgttgatattccaaatcatcttcagatcatcctctttcgggatcggcagtttcgtatctactacgattgtttttccctgtgccgtctgagagcttcttttagcgattaaatttaaggtaatatcgtaaacattccctttaatatcattcaccgtaaaagacatttcgtccgtagattcgcttgttccgttcagagtttttccttgaggatcagtcattgttttcgtatctctctgatacgttgttaaaggataagtttttcctttttccagtttaaaagtctgcgtatacactcccgctgaatctttaatcgccggattttcctctactttcgctacagaatctgccggaacttccaccgtaatcgtttttccggttttaggatctacttttgtaatttttgccgtttcttttttgttgcacgaaacaatggctatggttgagataagcgctaaagctgctatgtttttcattgtaaatttttaaatgttaatggaattaattggctttcataaatttctgtctcactgcttcatataaaatcgctccgcacgcaacagaaacatttaaagactgtgttttcccttcgatcggaagttttattttttcgtcagaatggtggagaacttctttggaaattcctgtttcttcatttcccataactattgcacaaggttctgtaaaatcaatatcataaattaatttttcagccttttcgcttgctgcaaatactgaaattccgctttgctgaagaaaatctaccacatgagcaagattcggagctttacagatttttacattataaagagctcccgctgaagtttttatcgcatcggaattaatcggcgctgcccctttttcgggaataatcaccgcatctactcccacacattctgcggttcggcagatggctccgaagtttctaacgtccgttaatctgtccagaatcagtaaaaaaggagtttttccatcctcaaacaattgaggaaccacatcttccactttatgaaaaggaacatcggaaataaaagcaactactccctgatgattttttctcgtaaaacgattcagcttttctaccggaacgtaattgggacggattttatttttcgccagaatagctttaagttcagcataaataggtccctgcaatgcattctgcacaaacaccttgtcaattgtttttcccgcttctatagcttcaattacgggacgcagcccgaaaataaaatcatctttcattgaataaattttatgttaaaggttcaaagttctatgtttaaagttttgagttcggtgaaaggctaaaaacaataaaccttaaactcaaaaccagaatttcatgttttgtactttgttccttttaaatctgttatatttaaatatttaataaatgagtcaatctttaggcttaatacttcagtctgttctcttaatgcttcaaatttttcctcagagataaaatttctgtcaaaaacccggtataactgtgattttgtttcgccacaagaagcctttgctattgaaagaaactgaataaattccctgttcccgtttctttcaaaaccttcggcaatattatccattactgaacccgaagaactatcaatctgattgcagagtttaaaattatttttaagattagtagattcaataattccgtaaatttctttacacaattcgcgcgataatttccaaatttctaaatcttcgaatctatttactgttgccatgaaccttaaactaaaaaccttgaacctctaatatttttcccctaaaatagctctcttctgcgccaaagcatagccataatgcagaccttcgtgcatattgttaaaaataatggcatcctgaatgcttttcagatccagcccaaaacttgtggtgtaaggcgtataatccgagaagaaatcgctgtcataatctttcatcaggatttttgaagtttcggttaataaaaactccagatcttccacttcagatttctgcacatccagattcggaagcgttccttttttataagtttcgatccagtatttatcaattctgaaaggatttccgcttaggtaataatgcagcaactgctgtgtagcaaccgtatgagcaatgttccagtaaagattattattgaaaccgtccggaatcagtaaaagatcttcgtgagaagtgttctgtagaatatccagaaggttttttcttacttgtctgtgtgcttgaaaatgataattcattttgcaaaaattttaatctccaaaaatagtttaataaactggaaatgacaatttttgagcggtggattaaagcaaaatttatatatttttaagaaaaatagtattgattgtattgagttttaagccttcatctattcaggatcctgcatcaatgccggaatatttaacaaactttaactcaaaaatggcattttttgtgttgattaatgcaagtatttattggaaatttacccattattttaaatcaagatatgtcagagatcaatcaagctgaagatattcgtcaattgacggagcaggtaaaagaagcaaactactttttttctcttttgagacaggaaatcaacaaggttattattggacaggaatatatgatagaccgtcttttaatcggtcttttaggcaatggtcacgttcttttggaaggtgttccgggactggcaaaaactctggcgataaaaactctggctgaagcggttcacggagagttttccagaattcagtttacgccggatcttcttcctgcggatgttgtgggaacaatgatctacaatgtaaaagacaatgatttctctataaaaaaagggcctgttttcgcgaatttcgttttggcggatgagatcaaccgtgcaccagcgaaggttcagtcggctcttttggaagtgatgcaggaaaagcaggtaaccataggagacgaaaccatgaaacttccaaaaccgtttttggtattggcaacgcaaaacccgatcgatcaggaaggtacttatcttttaccggaagcacagagtgaccgttttatgctgaaatgtacgatcgactatccaaaacttgaagacgaaagaaccgtaatgagaatggtttccacttcgcatcagccaactgtaaaacctgtgatttcacttgaacatattgttacggcgaaagaattaatcaatcagatctatcttgatgaaaagattgaaaaatatattctggatatggtttttgccacccgtttccctgaagattacggactgtctgaacttaaaaattatatcagcttcggggcttcaccgagagcgtcaattaaccttgcgattgcttccagagcgtatgctttcttaaagggaagagcatttgtaattccggaagatgtaaaatcgctggcaaaagatgttctgagacacagaatcggattaactttcgaggctgaagcggaagaaatttcttcagaagagatcatcaacagaattctggctaaaattcaggctccgtagtattaaaattatgcatccaaaagaaattgaaactgtttcaaatttaaaactatttgaccggtataaatattttattaaaaagattgctgattttgaagtattatataccataaaaagtttagaaggaaactttgctatttctgagacaaataactatcttatgtttcctgtgtggtcccatcaggagtttgcaaaactgaatctgaataaagaatggcttaattttaaaattatagaaatttctttagaagaattatcagagaagatttatccttttattttggaaaataattatctgataaatgtctttccaatgaataacaaaacaggctttgttgtaagccttgaagagtttgaaagagacttatcggaagaattaaaaaattatgaatagaattaaaatatcagctctttaattttagaatggaacaaattatcattagaaaggcagctcaggaagattgtgaaccgatgctggaattaattaaagaactggcggattatgaaaacgctttgcatgaagttaccttaactttagatcagtttattgaagacggattcggaaaatctcctatttggggtgcttttgtagcagaatttaatgggaaaattgtcgggatatctttgtattatgacagatattcgacatggaagggaagaaggttgtacttagaagatttggtggtgacggaaaatctgagaggaaaacagatcggcaagaaattatttgaagctaccatagactacggaaaatctaaccaatacagcggaatggtttttcaggtgctcaactggaacgaaccagcgattaatttctacaaaaaatacagcccgaaatttgatgacgaatggtttaatgtttcgattgagtttaaataaaataggatggaagctggaggcaagatgatggaagttttaaaaagtcacaagaaactctcatacactaacactctcaaacatagaaaatgcagataaaagatattgtaaaaaaagtaaagcagatagaaatccggacccgaaagaagacggaagctactttaatggggcaatatcatagtgcttttaaaggacagggaatgacgttttcggaagttcgtccctatcagtttggagatgaaatccgcaggatcgactggaacaaaacggcacgtttccgcgaacctttcgtaaaagtaatggaggaggaacgtgaactgtcgatgatgttggttgtggatatttccgcttcgatggattacggaactaaaaatcagctgaaaagagaatatgttgcagaaattgcagcaagtttaggtttttcagcagccggaaataatgataaggtaggtttaattttgtttgcggataaagtatacaaagtaattccgcctcaaaagggaagaaaacatattttatccattatcagtaccattttaaccgcagattatgttcctgcgatttcaaaaattgataaagcaatggaatatatgatgggaattttcaaaagaaaatctttggtcttcctgttttcggattttgaagatgaatatgactccaaaatgctgagagtggcttccaaaaagcatcagttgctgggaatgagaatttatgatgaaaaagacaatgaaattccggatgtgggatataccttattatatgatgcggaaaccggaaagcaggtttgggtaaatacttcaagtgcaagatggagatataattttgccgaagcaaaaaagcagaagctgaaatctttagaagaagattttgccaacagctcggcaagttttatgaatattaatacaggttcggattattcgagattactgtataattattttcagaagaaataaaaatagacattttttgtcattgcgaggaggaacgacgaagcaatcttttttaatacagattcttccttcgtcagaatgacaaaaacgacgttaaaatttaataataaaattgaaaaaactattatttatattttgttttttaatctgtgcaaatgcgttttcacagatcctttcttccagtgttgagaagaaaaccattgctttgggagaagtgaaccacattgtgatcaccattaataacctgaacaatgaaaaagtttctgcagctcgcgaaaatgagttgttgccttttcatttcgaagaaattaaagacagtatcgcgcagacccaggatgtttattacagaagaattgaatttgctgtttttgatgaaggaaaatttaccattcccgaactggaattcaaagtcaacggaaaagttctgaaaacaattccttacgaaattgatgtcattaatacggctcagaaaacagaccagattaatgacattatgaacaacaaagaagtaaaacttgaagctaccgattactgggaactgtataaattttacatattagccgccattgcggtcatctgtctcatcattgcggtcatcatgttcattaaatacggacgaaaaccaaaagattcgccggttgtcgccacaaatcagaccttgaaggaactggattctctcaaaaagaaaaaatatgtggaaagtggaaattaccgttcattttatgttgaactgattgatatttcccgaaaattcatcgcaaaacaataccgcgttccggcagatgttttactaacggatgatcttattgatgtgatgaagaagaacaataccatttctcaggaaaatgaaaaaatagtggaagacgtatttttaagaggagatctggtgaaatttgcgaaaacattcccggatcagaccaccatggaaaaagattttgccgacatcagagattttgtaaaaagatcctcaaaagatcttgaatttgaaaacttgagaaaggatgcctgattttgaattttacagtccgtggtttctgttgcttttcgcgctgtttatccctttgttattcagggatgcgagccggcagaaaagaaaaggaataaaagttcctacggtaaaaaatatgggggaaagcggtggaattcatttcattatgtttatcctgcgaatttcgaagtatattattctttctgcactcataattgccatggcaagaccgagaacttttacggtttctcaggacagagacgatacaaaaggaatcgatatcatgctttctgtggatgtttccctgagtatgctggcaaaagatttaacgcccgaccgtttaacggctttaaaagatattgcgattaaattcgttaataaaagaccgaatgacagaattggtctggttgcctattccggcgaagcatttaccaaagttccggtaacgtccgatcatcaggttgttgtggatgaactgaacaatctgaatcctctggaattacagccgggaacagccatcggagaaggactttccgttgcggttaaccatttgaaaaacagcaaggcgaaaagtaaaatcatcattctgatgacggatggtgtgaataccattgaaaatgcaatgcctcctgcaattgctgcggaactggctaaaaataacggaattaaagtatattccatcggaatcggaacgaacggatatgctttaatgcctacacagaccgatattttcggagatcttgtttttacggaaaccgaagtgaaaattgatgagcctgttttaaaagaagtcgcacaaatgacaggcggaaaatatttcagagctacatcaaacagcagtcttgaagaagtgtatgacgaaattaaccaactggaaaaatctgatgtaaaagttgccaaacttttcaattatcaggaatattttaaaattttcctgtggattgctttgggtatgctgtttttagacgctttactgagatgggtgttttataaaattttaagttaatggattggtatttagggaattattggtttttattattgctgttgcttttgccgctgttagcttcctttttgatccgttttctgaaatggaaaaaaaagaaaagagaaatttttgcagacagccagtttcatgagcagttattcgagaaaaaatccggctttaccaagttttttccagctctgtatcttcttggaacattgtttttaatattttcgattatcgatttgttaagcggttcagaagaaattaaaaccagtcagaaattaaataatgtcattttcatgctggatgtttccaactcgatgaatgctgaagatattaatccgagccgtttaacggaagcaaaaaatctgatgcttcagacgatgcagaaaatgaaaagcgataaagtgggaatggtgatttttgcaggacaggcaacttccattatgcctttaaccacagattataattcagcagaaacctatatcagcggaatcgaaacaaactccatgcagattcaggggacagattttctgaacgggatgaaaattgctgccgaaaaattcaaaaatgtaagcaaagacggaagaaaagttgttttgctgagtgatggggaagataacgaaggaaatgacgaagcagcgatacgactggctaaaaaagagggaataatgattacgtccatcggaataggaacagaagagggagctccggttccggaatatgttttcggacagttaatggggtataaaagtgacatcaacggacagaccgttatctcgaaaagacagacggaagcgctgaaaaaaatggctgatgcaaccggaggaagctatattgacggaaataacatcaatgaagcaccggacagaattttagatgctctgaaaaagaaaaccggttcatctgaaacgatggtgaaatcacaaaatgccaatcattattaccagtattttctggcagtttctctgtttttcttctttctgatttatttattcaatcccaaaagagattttaatatttgataatcgaatacattgtctcataaccagactattactttaacccaattttaacaaataagacactgtttattaacatttaaaggaataattttgcacataatgaatactaaaatcatttttttatcgtttataattgctttcatctttccgggaaatcttttcgggcagaaaaattacaggactttagtctatgaaggcaacgaaaaattcaacggtaaagattatgatggagcgtctgtaaagtatctggaagcgataagaaccaacagcaaagattttacagcgcactataatttaggaaacgcattatacaaaagcaaaaaatacgaagaggcaaaagcggaatttgaaacggctcagaaactttctcagacgcttccggataaagcagcagctcttcataatttggggaacacctatatgcagatgaacaagcctgaaaaggcagcggaattttacagacagtccctgaaacaaaatccttacagcgaagtaacaagaaaaaattacgaaattgccaagctgaaggataaagaaaaccaacagaaaaaacaacagcaaaataactccggtaaaggaggcggtggtaaagaccaacagcaaaatgatgatcaaaaaggaaaagatcaaaagcaggatcagggacaaggtcagcagaataaaggagacggacagggaaatgatcccaaccggaaccagaataatgaaggcaaaatccctaaaggtctcgaaaatcaaatactcaacaaagtaagcgacaaggaaaaagaaaccgccagaagaattttaaataaaaattcttattcgatgcccgagagcaacgagaaagattggtgatgcagaacagaattatctacatattactcttaatgtcttccgtaatttcttacggacaggtaaatctttctgtaactccggataaaaccacttatagctccaaagaaattgtcaatctcagtattgttcttgaggtagaaggggctgaatacaatcagcagacaaaacttcgtcttcctgatttttccaaattcaatcttatcggaacaggctcactgagcaatggatttatagatcctgaaagtaacgttgcggtttcccaaaccatcacaagacttgctcttgagcccaaacagaaaggaaaagtaaagatcggatctttcctgattaccattaataataaaatttataaaaccgaaccttttgacatttttattaaagatgtagaaaagaaaccggttgcagccaacaatgcttcaaaagatgtttatctcaatatggagattgacgaccgtgaagtgtatcaggatcagcctaccattgccgttctgaaagtctattcaaaaaacatggataacttcagaagggtaagaaacattcatcttcccgagcaggacaatctggatgtttttccagtaagttttaccaaatctgagattgatccttccgatgcaggaaatatggcgtcgcagattctggctgtatttatggttttcccgaatgaagcggggtatgtggatattccgggagtttcggcttcgctgaattcctacgcgcacaaaaacaaactcgtttccaataaagtaaaaattaacgttaaaaaacttcctgaaggttctccggaatgctttaaaaatgcggtaggaaatttcaatgtaacggttgccaatacttcaaaagaaaaagttgaggttaaaaaaccaatgaatgttcttataaaagtaagcggagaggggaatcttaaaagcatggagcttcccaaaattgcagagtctccggattatgaagtttttgcacccaaaattacttcgcgtgtcacggtgggaacggaaggaatgaaaggggaggttttggtaaattatcttgttattcctaaaaaagcgggagaaattacaattaaaacagaacatttcgcatttttcgatccttcgaacaaggagtatgtagatcttggagaacagtctttagcagtaaatgctttttctcatgatcagatccttgaatcccgcactgcggttgagaaagtgaatgagtataccaatacttttttagaaacggtaaatacgccggttttaaagaccacttcatttaaagtaaaagagaaaaagaaatttcactggaatgttctttttatcaatattgctattttgctttccttattcgggatgtatcttctgtttaaaacgtggcagaaaaagaataaattatctaaagaaacgaagactccgatggctttaggttctgttgccgaaacagaaaatgaaatccgtgaaaagtttaaaacagatatcaacgactatttcggatatttggaaaatcttaaggataatgaagattatcaaaagttttttcaaaccttcgatgagcttgatgaagaagttaaaaaacaatattctgtaaatcctgctgatcatttcgctgagctgctggaaaaagaaaaaggctcgtcaattgccgaagaatacaggaatcttattcaaaaagtgcaggttgaaaagtatgccccgataaaaacttccgaaggaatagacgaacttttatcagcaatcgttaatttgtattctaagattagcaaataattaatttattttcatatttttgcgaaattattaattgcaaggaaatggaaatatttaatgatttttcgataaaagagattgttacctgttttatggttcttttcgcagtaattgatatcatcggttctatcccgattgtggtaagtttacagcagaaattcggacagatagaagctgaaaaagcaacgattaccgcaggagcgattatgcttgttttccttttcgtgggaaacaaaattctgaaatttattggtgtagacgttaattccttcgcaatcgcaggagcttttgtgatttttatcatagccctggaaatgattcttggaattgagatcaataaaacgtctgaagcaaaggctgcatccatcgttcccatcgcgtttccgctggttgcgggagccggaaccttaacaacaacactttctctgaaagcggagtttcatgatattaacattatttttggaattattctcaacacaattttcgtatatttggtgctgaaatctgcaacgtggctggagaagaaaatgggcgatgcaacacttgccattttacagaaagttttcggaattatcctgttggcgatttcaattaaattattcaccgcgaattttgcgcagctggtgcagaattacattaatttttaagagttatgcagaagttttataaagtatttttggtactgttcatcgtgtttatcgcaattaatctttatgctttagactggcaatcggatattttgtctgaggataacctgaagtttgttttctcaatagcttcagcggcaataggtcttattttgctttttgtaatgaatacatggagcaaaattggagtaagaaaataattgaattacaatcttatataaagcctctttcagactgaaagaggcttttttatttctgcttcttattgcattttagctctcgaataataaaaatctaaagtaaagagttttgctcctttaggagcagaatctgtttagaaataagaataaatctattaatcaatccgtaggattgatatctatgatacgatacattttataaagatagcgttcctacggaacgccgaacgtacggttaatatgatttctacacagataaaactccatagagttttctagcgttttactttagacaaaatcttgaatcttttgcctctttttcggtcaaataaaatttaaagaagtttattattttaaaatcaccagatttttcagaacagcttccgatttcagctccgtttctgtccattctttttcgggattgctttgtgcggtaattccgccacctacaaataaatgaaccgcatttttatacagttttgaacagcgaagattaacaaaatactgtaccgtttcatcagtctcaattttaatatatcctgcgtacagttcgcgcggaaatttttcaatcttctgaatttcttctttacaaaaatctttcggaattccgcaaacagcaggagtggggtgtaattcctgaataatctgatctaagttttcaggcttaatttgggctttaaaatcggttcggagatgcttgatgtttcccgaaatatgatcgtaggtttcagattccgttacgttttcagaatactggtttaaaatatttctgatgtaggacgttacaggtttctgttcctcaatttccttttccgaccagttttcagaaacgggaagcgttcctgcgagactcatcgtttcaaattcgtgcgtttttttactgaattttcctaaaacttccgagaaagcacccatccatgaattttcgtcatcgataaaaatatatctgaatgcattcggataggattgacaaagatgattaaagctttctttcagattaatttcttcaaaatctgtgaaaatttttcttcttgaatagaccagtttcggaagcttatgttctttgataaccgcaattactttttcaagattttttaaatattcttccttggtttcggcttcaaatccgcttttgtcttcaggtaaaaacttacttgaaattgctgtctgattaaaattttcagggtttaattcaataatttttcctccaaaatccaatcgttccaatccatcaaaagaataaaaactgatagggttttcgccggaattttcatctgtggaatacagtttttcgtcgaatggaaatttgaaataaatcattgtttgaagctttttagaaaatcagagtcgggaaataatataagaaattccaacgttgatttttctttctgcaaaggtattattagtcttaaaaatctcaaaatcaaagtcagggttttttaaggaaaaattcttgatgctgtaatgctgatattccgcagaaatgatgaaacgtcgcagcaatctgtactgaagacccaaagaaaatccgagattggtctgtgtgcttttaaaatcctccagtttggttaaaacatcattttcaggagtcagaaactgcattttataagtctgattatttagcaaaattcctgcaaacggacggaagtttttccagttatacatcagtttaagctgaattgcaaactcaaaatgttcattattaaacttctgaaataaaagcggctgattatcttcggtaaaataatatccgttcagaaaggtgtcttctttgttggcatcgagatcgaaggatgaattccagtgatacgcattggcagaaacccatactaaaaactgagaatcaaagaaacttttggaagcccagattccgagattttccccgaactgcggtttattttctaaagaccagcttgcactttttataccaaatccgccttcaattccgtactgaaaggtcaccggttttcgcaatcttgctcttcttgaagccctctgtttgtcgatttcctgcttgtatacatccgtcacaaatttcgtttcctgaacgatcggtgttttcatcacaacatcattcagcctgaattttaaaggttttaagagatatacggtatcataaacgactactttttcgtagacgtaaaccgtatcaattttctttttcctgattttctgtgcaaacgaaaagttaacacaggcgatgagaaaaagaagtattattttttgcaaggacatattctgcttttcaatttatttttcaataaatacggtgtcttttttaatgatttttttaacgacaattactttctgcgaagtttcttcaatggtgtcttttacagtcgttttttttaaaaccggtctgcttttcaatcctgtttcatcgtcgtttatttttgtttttgaagtgtttttctcttcaattatatttgttgctgactgatttagagcattattgactgatttttcttttttatcgaaattgatagtttctaaatattctttagtctctttattttttatttcacctttgtttttaaaagttgatgaaactgaatcatgatcggttgtgaaaaacgaattcttcggatttataaaaaaaacggacagcacgatgatgattaaaaacgttcctccaattattattttctttttcaggcttttaccggatgatgaaaatgcaacgttatcaattttaagatctgaaggaatctgcaatttttttgatggctgaatggtaaaatcagcaaatttgcttttaaaagtctgcgcccaaagcaatccgccaagtccgaaaataacaagcagttgagccatttttttcttcggagtattttgattgacaaaattcttcatcagataattctgaacggattttttcgctcttaaaaggtgagattttgaggtatttacggtaattcccaataaaccggaaatttctgcatgagaatgattttcaataaaatacaaattgaaaacggatttatgatgggatggaagactgtcgatggaagacagcagttcttcactggtaaagtcgtaaacgaatacatttttctcttctaataaatgatggtccatttctgaataggtatctgggatttccgaaggttctgtggttacaaaagtatctttgctgtgtttgcggatgtgttgcagcgcattatttaccacaatttttttcagccaggcaaagagagccttttcatcattcaactgatcgtttttctggattgcggtaataaagctgtcctgcacgatgtcttctgccgtgtaaatatcatcaatatatcttctgcatattcccagaagtttcggggaataatcgagatagattttctgccagttgaagttgctgttttgcttcataatttaattcgcgacaaatagtaggtttttatttaccggaagttttattaaaattttgaccttttcaagataaagttaaatctttatataaatgaataaggtcagtaaaaataaatttaaagttttcatgcttattattttcttatatgatgcagaaaaaataaaaggttgcagcaagaaaataaaaaaagctcaaattttttttgagcttggtattttttagtgaaaattaaatcttatcggttgatgatattgttcgtcatcgtggtatgattgatgagctgacctttttcatcgcggatctctatttctgaaacatgcatcgtttttccttttcggatgaatcttgcaacggctgttacgattccgtcttttttgcttcttaaatggttggaattgatgttggttcccactccgaaatattttgtaccatcaataaaaatattagacaggcttgaacccatggtttctgccaatacacagcttgcgccaccgtgcataattccgaaaggctgatgaatttttggtgaaacaggcatggttgccgttaatgtttcattgtcaacatcgatatccgtgaattttatatccagagtttttgcaaacgtttctccgccccagttattgatgaattctaatatttcttccttgcttttatcttttatgaacatattttttaataatgaataataagtgattagtaatgagtaattttgatagcttccagcttccatctcctaacctttagcctcagaatcatttcccatgatattcgggttccagttttccgggattttaggaactatatcattttttatgtagtaatcctgaatttcctgcataatttcggtaaacggcgcagatgcaattctttcgtagggaatggtatacccaagataaatgatttttcttttgaaatcacctgctgcaagaacgataggaacttttgccgctaatgcaatgtgataaaaaccttttctccatttcggaacccagcttcttgttccttcgggagtgatgaccagactgaaatcgtctttttcaaactgtttggctacgaaattcaccagatcattcttctggcttctgtcgatcccgattccgcccagaccttttacaacgcttccgtaccaagctttggtgtgtgcatctttgatgatgatttttaatggttttttcagagaccagtaggaaagatttcctaaaatatattccatgttgtgcgtgtgtggcgcgactacaagaatacatctgttcagaacgttttcgtcgccctgaagaacgactttccagcccattaattttagcaacagtttgccgatcagctttctcatatagttttagattaaaaacaaaaaagtataaccaaagtggttatactttacaaatatattgaaatattatcgctcttaaaacagactgctgattaaatcaacaattttcattacaatttctagtgccagttgtaccatgattattgaatttttattgagtgtttggttttaattttttactacacaaatgtaaagatttttattgaaacagcgaacaaaatctttatatttttttgttttcagtgagagaagaagagtgtgaatttcaaacggttgtgttattcattcacaccttctgccactctctgcagtttagttatttggtttgtatggaaatttcgtttttaccttcgtctaccttgaagtcgatgttggctcctttcatctttttgatactgcttttcatggagtcgattacctgatctgccttattgctcggaactttttttccgttaacgataatgctgtcttcatcatcagagttgtattcaatcgtagaaccgtttaccgtgattttatttttttcgattttgatgtttccgtcttcgtctctttcttgatcgtcatcattaattccgtctgcgttaagatctccgtcgaagctgattccgtctttttttacagggatcactacggttttcaaaggaagtaccagttcataatctatgctgtaatctctgaatctgtgttcgtaaggatatttgatgtagttcggaaggacgattttattgtttaccacttctacaggaacgcttacatttaacggaaggttatagcctttagcttcttttttaataattaaataaggcgttttgatgtctgcttttctcgttacatccacatgcatccagtctctttcgtatacggaaactttgtctgaataaagatcatcatcgtatcctttaaagttctgaggaatggaaacctgcttgaaatctacataaatactgtctgattgagtgttgattgcaatttcttccgtatcctctttatgacctttcaggaacatttctctttttgccatgctgaatccgaaataagtacctaaagtgatgagtgcaaggaataaagctccgattacccaacctgtatttctcagttttgttttaggagaaattaatttgatgcttaataatccgaataacatcgcaggcaataaacttcctaaagtaatcagtgccataagaatgtacttcatattgtcgttatcaaaatagaaattcatctggcttaccggaggaaaatcgctgtctgctcccataaaaccgaatactacaaatactccgatgagacaagacaaagacatgaagccgaaaatacctcctaaaatatatcgtaatacattccaaagcccgcttccggcgttgttgatgtagggtttgttttcaatatagatctctccgaccctctgagtagattcattggcaaactgtaccaatttattagactcattcttaagattgtcgaagttcataggctttcccttcattttcaggaaatctgctgcggtttctgcttttggcaaaactgcccaaagaataatataaagtaagaaaaccaatgttgaagaaacggccgccgtaaagattccaaggatgaaaacgccaagccagatcgctctcatggcagtaatgtccattcctacgtaatgtgctaaacctgcgcaaacaccggcaattttttgtctttcaggatcacggaacagttgttttttatcagaatattccgttccggaagtatttgttcttttggtatttttctcagaataataagcttcttcctgctcttcgattttttcagggcttccgatctgtgcaattactctttctacatccgagtcgttaattacctcacgttttgccatagaatctttgaagatttctaccattctgatttctatgtcatgcattacctcatctgcttccgaagcgtccagagagcttctcagagcattcaggtaatcgctaagttttatgtatgcgtgttcttctatggtaaaagaaaaacctgcgagtcctattgagagtgtcttgttcatagctttgtttttaatttttttgagtgatttggttaactgaattggttaattcgttccaggtgttttgaagttcatctaaaaataatttacctttttcggtaatctggtaatattttctcggaggtcctcctgtagattcttcccatctgtatgaaagaaactcgccgttttttaatctagttaaaagagggtagagtgttccttctacaacatccagttttccttttttcagttcatcgattaagtcggaaacgtacatttcgcgatgattgatgagacttaaaatacagaattccagaatcccttttcgcatttgcgctttggtattttcagtattcatctttaataagttttgttaattagttacataattttcgaaacccggaacctagctagttgtacctgtttcgattttacattacaaagatatgtaattaaaatggtattatgcaatacaaagtagtgaaaaaatactaataaatagtttaactaattgataatcagtttaattatttttaatgagaaattttatgtaatgagaattttatgaaaatcagatcatatttttaacaattttaccttttaggctcaatgttcttaaagtaaccaaagcttttttctttaattctttctgatatgatacaaatctgtagtttttatagaatctacggacgataagtgccatttccatcatagcaaagtgttctccgatgcaaagtctggggccagctccgaaagggtagtaaggaaagttcttggcattttcatcatcaaaacgttcaggaataaaagaattgggattgttccagtacttcggatttctgtgcagacccgtaatataaaggattattaaagttccttttttccatgaataatttttaaaactgtcgtcttccagagcctgccggtcgattgcccatgccggagaatgcagtctcattgcttctttaatgatatttgtggtgtaagattttttcattaagctttctgtaccaaaagcattttcaccttctgctgcaatttcagctcttagtttttcttcggcctcaggattttggctgatctcgaaaaagataaaacttaaagcattggcagtggtttcgtgtcctgcaatgaaaagaatgagcatttcatcaattagctgttcatcagacattggaagctgtgtgtcttcataacgtgcctgaataagcatatccagcaaatcatttttttcttcacctgagcttcttcttttatccagaacatttttaatgatatttttcccttcattattttttttcattattttatccattattccaagactttttatcacttgcgtatacaaaggtattcttacttctttggcaaagacttcctgaacttcggtaatgatttttcctaattcttttacgctttcttcatcaatatccgagctgaaaagtgttttcgcaacaatgttgaaagccagtgtatgaaagaggtcgtacaaatcagtctccggttcctgtggaaaagcctgaaatgttttatcaatttcagcctccataatgccaaccaagttggagattttgatcttactgaatcccggctggatgaggcgtctctgtttcagccagtcttttccgttattggtaagaagtcctttcccaagatattttcctaacacaaccgattgtatatcagatttagaatagtttttatggttttgttttagaacatattcaataaattccttatcctgagaaaagataaaatcagtatttgttacactggcttttagatggaaagtgtctccggcaatgttatgatttccgctgatgacttttaagggattatttacaccataaaaaagagagtacagttttctttttcctttaatttctgtaggataattgtaatttggagtcatgtaaaatatttataataaaagtaatactaatctgtgaattagaataggtttaaagctaaaagtcttatttttgtattgccattttactcgctttaattttatgcttttttaaattttaaccataaagcagacgaaagatttatcataaactcattatcaaaataaacagtattctaataagcataaaagtctgggatctttttaattgatatttttttagaaatgtgaatcttttaaatgaaaaattgtcaaaactttttttaagtgattgataaatagatggtctcaaaataattatatacaatgaaaatacaaaaagaaatcgattttattctggccgttgatgccctgaaaaacgtacaaagaagaaattacaatgcagacgattcacgaagagaaaatacggcggaacattcatggcagattattattctggcgcagatccttttcccatatgcaaagaacagagcagatatcgatttattaagagtaatcagaatgttgtctattcatgatcttgtagaaattgaagcaggagatactttcatatttgatgaaacggcaatggttgggaaatttgaaagggaaaaagtttcagctcagaaaatcttcggaattttagatgaaccgctgcgttctgaattttttaatctttggctggaatttgaggaagagcagactcctgatgcaattttcgcctgcgcgatcgaccgcattatgccttttattttaaattcccacacttcaggaaagagctggacagaagccggcgttacagaaaagcaaatcagaaatatgttggaaaatgccattgtaagagcttccgatgaactgggagaggcatttcagttgttgctgctgaagaatctggaaactgaaaaggtattgaaatagaaaggtttcggcgggctttgcccgccgaaaccgctttaaagaacattgaaaatattggattccggcgaccaaaggtcgccggaacctttttataatatttgaattggcttcttgaattcatcaatcgctacaaaagtaaaatctcctacgattgctctttctctttcatacgaatacatctgttccgtgaaaatttccacatttactttcatactcgtttttccgacatgaaccacttttccgattagctctacaatggttccggcaggaatagaccttttaaaatcaattttatcgctgcttacggttaccacacgttttcttgcaaatctggtggcagcaataaaagccacttcatccatcagttgcattgctgtacctccgaaaagcgtatcgtaatgattggttgtgttcgggaaaaccgctttgaaaattcgggtttcagattcttcaattctttcttctgtagtcatatatcattattaattaaagcgagatgaaaaaaatagaagaacaatagaaaaagcagagacagaaatctctgagtgtccattagatcaacaaacttcaaatcgcgaaagttttttgttattaagaaaaaggcaggtctcctgacttgtaacatctttattcccttcccatgaattacacagtggattttttttataaagactttagttacttacagttgcgcgacagttcgtgattttcacacgattcccttttaatctgcagttaagcaaaaccagtttcctgaaaagtcacagtctggaaaagagcccatactcatgcttttcgggtacaaaaataatgataattaatgaattattcgggagttttataaatgatctggctttcagcttttccctgtttgatcgtccagattgttgtatagcggttttcaccggagccatttatcatataaagaaaaatatgatcgttatcgatggcggttacacccacgttattgaaatccatcgttggctgaaacatatttttaatagcatctcttacaaaaacagaacctcttcccggttgctgaacgcgtacagattttatttcggttaaaccttcaggcaattcctttcctacgccccaggcttttactttgtcaactttagtaatgtttccattggcatctttttcctgcttcttaatgtgtgcataagaagggtaaacgtcaataataacctttgttctttggtttccgggaattttaggattggtgtcgtctgtaaagatcagagattttccgtttttcgattttgaaggtgtaaattttggtaaattatctacaaaaaccacacggtttttatttaccattccttctttagtaatgctgtcgtatcttacgaaaggtttttctgtatcctctttttcaggatattttatccagatccattctgtttctcccggagccggtttttcataaataaaaacatctcctgttttcatacggatcttatcaacgatttttcggtaatcgtctttatgaacacgcaccatggcataaccttcctcagcttttacaacaccgaaaggaactttattctgacctttcgccaatgcaaaagaaaaaacactgaaaactgaaagataaaatgctttacgtagagacatcatcatgaaattttttgacgcttcaaatatataaattaaaatttgtttaaacttttcaaaaatataaaagtaaactgattaatttaaacttaaaaagccgtcatgaaacctttgtactggttttctgtatatattcacttggagttaccccttctatttttttaaatactttattaaaagttgactgattcttaaatcctgcttcagagtagatatgcatcaaagtcattgttttcagttcatcactatgaagtttattctttacgtataccacacgatgcgtgttgatgtaatgattaaaattatcgaatccgttgatttttatggctttggaaatataattgttattcactttaattgtactactgagctcggaaatcgttaaatctgcatttctgaataacttattaccaataacttcctgatctattttctcaaaaatattttctgcaagttgcaaatctttatcggcaacaggagcaggctgagaaacctttttctcaataattacctcttgattcttaatattttgaataagatttttataatatgttcctaaaaatatctgtataaggttaacagtcaatatgaaagcatctgtaaggcgtcctttctcaagatcattaaaaggatagccgaagtaatcgtttcccgcaaatacgcagcagaaacttatgagaaaaatagcatatactgtgaagaacacaacttcttttttcgaaaaaaaaacattagcccaaaagggtagggctacaatccatattaaactgcataccgaaatattccagaacctgaatactataaacagattataaagcggcattacaagaatgaaaatcttaactactttaagaagatcgtaatgatttcccaatatataaaaaggaagaagtaatgaaaaaaaacctccgatgaggtaataaaccattatcggatctttcatgtaaaatgaaaaaaccagaataaatgtaatgaatgttacaccaagtatataaacatatcggttagcaagttcccttttcagatccagcacttcaatttcagtattttttttccccataatattctaatataatataattcagaaaatcatttatcaaatatgttgattatcagttttttatattagttgcaatgaaaagtcatttatcatttatctcttgttttctactcaaaaatgtgactctatatttgcaatgtgtttttcagttagcaaaattacaataaaaatttaatctttaaatattgataatatagatatctgataacccccttaaaaaacatatattatgacgaacaaaaaaaaattatttcttctcatttcctttacagttttgggatttaaatcttttgctcaggttggtattaataccacaaaaccgcaaggtgtattccacgtagacggcaaatctacttctgccacaactaatgatccgaacaacgcaccaacagatgtacagtcttccgacgactttgttgttaagagtaatggaagtgtaggtattggtacggtaaatcctgacggttccgctatactcgatatgaatgtggatcagctttcttcaggaagcaaaaaaggtcttcttattccgagaatggctttaacatccagaacggatattacaacaattccgaatccggcaacaggattattggtgtataatttaggaacaaattcaggatttagctattccgggtatgtttactggaacggaagcgagtggcgtcttatggaagacacttctccggtaggggcagttgctgtcttaaactgtaatgctgctgcattggatccatcgcagttaattgatggaaatacgcctactgcaattacttcaggaaccgtgatgaaaattccatactccggagcaaacgggggtcagtacagtggaattacattatattcagtaggaaatccgggagttacggcaaccattaccggcggaaagcttgaggttggatccggttctttagcatttgcagtacagggaactcctattgcttcgcaaacgtcaccggtggggataacatttgatctgactcctttcattaccgcaaattccggacttacaggctgcagctctgttactgtaggaactcaggtgaatgctgatattaaaacagtagcggttatggattatatgaaatttgtaacagatccggatacaggagtaaaaggatttgtagtagaagcaaagacaccggatggtctttacacagtaaaagttttcatgagacattctcttcaaaatgccaccgctactgcaagcaataacacaacctctactgcaagtggagcagaaaacaacgtacttttgcgaaataactccagtacatccaaaaccatcatgtggaattattctacattttatggtggacagattactgatgcaggaggaaatttagtggtgccgtcacaggttcctggtggagcagacggaaatgcatggagatcattatctacttctaatgccggagcatggggcaatccgggaatttataatgccagcaacagtggaccggaatatagatactattcctggattgatacatccacaacttccaaagtggcttacatagcaactgtaatggcaggaatggatccttcggctactgcaacacaggttactaagcaaaaagtttttattaaaatagaacaaattacaggacagtaataaagataatacacattgatgaaaaatgaatttcaaggacatccatatcggtaagtttattgaaattaaggttacagaatgtgggatggaaatttcccacatctgtaattattttaatttgaaagaagaagatatatataaaatgttcagctcgtcgcatatagactgtgccgttctgctgaactggagtaaacttcttaattatgacttctttagactttatactcagcatttaatattttacgcacctccgtcttcaaatctgaaaccgcagtcacaaactaaacataaagtattgaaatcaaacttcagaaaaaatatttatactcaggaaattattgattttattctcgaattgatggaagaaaaaaaactgtcaagacatgaaatctacgaaaaatataaaattccaagcacaacactatataaatggatatcaaagagaaaaaaataaagaaaacaactccggactataaacagatatatcaggatcttattacaatgaaatatcctgaaaaacttcagcagtgcgaacatatactcagaaaaaaagagctgggttttctggatgttttagaaattaataatattttaaaacccaataagacagatcagaatttgaaatcatatgataaatctaccattctgaaaattctggattaccagaaaaaaaataatttaaacaacactgaactggctattaagtttaaaatgagcagaaatacggtagggaaatggaaaaaaatattcttctgaattaatctgaataagagatcggaagataacctttatcttgtaattcttttaaatccttaatccgccttaaataacaatcagaaagaagataaatttcatctgaaacttccaacacttccttatagcgatgatctgagaggataattcctttctgttgtgattgttctttaatcattctctgaatttcaacaatcatttttggagataaagcgttaaaaggttcatccagaagaataaactttgaatcggaatataaaattaaaagaacctcaacaattttcttctcaccgccggaaaggcttccagaagtttcattcaaaaaaggttttagtaaatttaattcaaagagctgatccgcattttctttattacagaaaagtgagatcagttttttaatttttacacctctcggaagaaaagaatgctgtggtaaataagcaattcttcctttcctgcccatctggttttgtaaaattttatcatccactcttacaaactgagaatcgcctttctctgttccgaaaataatttttaaaagagtagattttcccgtaccgtttcttcccagcaatccgataatctttcctgtttcacaacccatgtagatatctctcagaattttcttttcgttaaaagattttgtaacactgtcaacatgcaacttgctcatatcaattttgtaatcacattaacaattacccctgctgaaaaagtgaagatccaaagaaaaactcttgaaaacccgaaattggcaaagaaaaaatattcatttttaaatcttaattcataaataagataatgaaaagccggaaaaaataccaaaaaacacaatccgaaattgtcagcagtaaaaccaagtagggcattcatcaacaaagaaaatagaacagcaggaatcaataattttacatagaaaatccagagaatccttatatttttaatcatatatctgtttaaactaattttgaattcaaccaaagttacatcaattgattataaagcttctactaaaatatcttaagctctcagaagaataaaaatctgaaattttttagaaactgatcaccaaatatcgttaaattttctccagatctttttttgacaaaaacagataagaatagattccaaagaaaacaaaaacaactgaaaataaagcggcagcaatataaaaagcatctccgaaactgtacgcaatatttatttttccatccattcccattcctgtggtatgttccatatcttccattttagctttaaaactcagataaaatcctaaaaacccaagaagtccggttacagaaaacccaagatgataaagatacttgtttcgtatggttttcatcagttgcacagcaattcccgcaatcgccattagaaaagaaagaataacaaacggatttggcgaaatatcacctttgtcactttcttcctgagaatcatcggatgaagacggacgatcctcctgattgcttacggaagatgcataaggagaactttttttaatgctttctctcattcattcgtccattttttgcttagaaactcccgttatcagatcagttccctttacagacattaaagtaacattaccgcatttcacaaggaaaaagggaaataaaaaacaaaggataattacagtatagctcggtatcggcagaaagtctgacagcatttttaaggtcttcataaattattgtttggggtaaaaatataaaatttaaaataaaaagagcgtcctgaacagacgctctcataagatattttgtaagcagattactcttttctgagttttgcttttacattattttctgtaatgattcttcgcaatccgctaatctgctcctttgtaaaatactttttcggaaccatattcatcgtctgtgcgctttggtagatcagaaaccattctttattttccttcactttataaaccgtattccatgcaaattctgcatcaaaagtttccccttccgtacggattttctcttccgtaaaaatgtacgtaatgttttcctgaatctttttattggagctgaaagcaaatctcagccgcaaaaaagaccggatcacgataaacagaaacataattccaagccacattgaagccgaaagcaaaatttcctgttcagaattgccatccgcaaacagtttcacaataaagaaaagcaaaatcagcaaaggaaaagcaataagccttattaaagaacttttgagatgaaacatcagaaaatccttaaaactgatatgagtttttaccgttatcatttaaattctttccagttcgtctgcgtcaatcgttgttttgaaagttccgtaattcacgatcactttattccgcgaaattttttcaatcgttcccacactcgtactgccggaaatacggacgcgttgcccgactttcatccagagagcgcggtcggttttgcgtttttcctccagtttctcattggtttccgtaattttttcaattacttcttcctttttaagctgttgggtaatcttccttttcacaacttgcagacgtttagattcatctttatctgcacccagttttctgaatttttcctgctcaagaatttttacaaaatcttttaccacatcttttctggactttccttttacgtagctgtcgataaaagcctcaatcttgttcccgaactgcagtttacggtgctcttcttcatataatttctggaaattgaataacttctgctgaagctgctcattcagtttctgaaggttatcacgcttatcttctacagattcctttctttcggcaagatcggttttaagcttttccacttcgtatttctcctgttgaagctttacaatcgttttatccagatttacaatatcatgttccacttttttcttggcagaatgaataatgaatctcgggattttattcttttccgccacctcaaaagtaaatgaacttcccgcttgtcccacttccagtttatacatcggttccagcgtttcttcattgaatagcattgcggcattctgagcattcggaagctgttctacaacaagtttaatgttggtgtagtgcgttgtaatgatcgcaaaactttttttgtcatagaaaaactcaaggaaactttctgctaacgcacctcccagttcaggatcggaacctgtaccgaattcatcaatcagtaaaagcgtattcgcttcagcttcacggatgattcccgacattttcttcaatcttgatgaatacgttgaaagatggttttcaatcgactgattatccccaatatcggtcatgatcttatcaaagaaaaacatttccgattttggatgggttggaaccagaattccgctctggatcatcaattgaagcaaaccaactgttttcagcgtaatggattttcctcccgcattcggtccggaaatacagatgattctgttgtgttccgttaaactcagcgtttgaggatagatcgttttattttccgctttatttcttaaaaacagcaaaggatggaatgcttctcttaatcttaacgttttatggcggttgatttttggtaaaacaccgttgatgagttctgcaaatttagccttcgctctcgttaaatcaagatcgaaaatatacttctgatatctccagagctgaggttggaattccgccagttctgcggtaagctgtcttaagatcttatcaatttcctttttctcttcctcctcactttcacgaagcttgaaataatgctttactacggaatccggctgaatataagtgatggaacctgtttttgaaagtcctaaaacccttcccggaactcttcttttgaaacccgattttaccgctaaaactctttggtcatcaataatcgtttcgcggatatcatccagaaaatcactctgtccataagttgttaacgcacggttgaaattttcctgaatcgcttttttggcgtgttgaatttcacttcttaatccttttaaagctggggaagcttcgcttttaacctcaccaaaacggttgaatactttatcaactttatcaataatctcttttctgaattccagaacagaaacatcttccataagagtagggaaggtttccggcatggtcgggaagaacttctgcagtttcccgatttgctccgtgatggttttgattttgatgaaagcgctgttttccagtcggtaattttcgatcagcattagcttcagctcactttcgatatcttcatattcatcaaacggaattgcatttgaactttcaaaactcgaaagatattcggaagtttttttcaatgaaagttctgcttcgtctatttccatcggacgaagttgaagaattttttctcttgttttcggagaatacgcaaagggagaaatttccgcgagcaattgcggaaactctaattcgtttaaatcttctttatttatatacacagtgcaaagataattaatttgaaaatgaaataatttgagaatgtgaaaatgatttattgatttgatctcttttatcaatataagcttcgggaattccattctatacttttaacgcttcgattgtattcggaatgttactttttgtaaaaaattttctgaaatcattaatataatgtataattaaatgatggctgatttaattttaaaacctcacaggtttcaaaaacctgtgaggtttgtttgccactatttaacaattagatttaatttttgaactttaggctgacttatttaataaaattttttgtgatttttgagtcagaaattaatgagtttaattactaaatttcttttaaaacctcacaggttttcgaaaacctgtgaggtttgccactgtttaacaattagatttaatttttgaactttaagatgactttttaataaaattttcgtgttttttttgtcgaaattaataatttaatttactaaatttatttaagtttgaactatgaagctagaaaccgaaagattaattctcaaacccatcgacgagagttatacagaagacattctaaagatcagaagcaatgaaaccattaaccagttcgtacaccgaaatcctcctaaaaataattatgatgcacttcagtttattttaaccattaaagaaaatacccgaaatcagaaatctttttattggggaatttctttaaaagaccagcctaatctgattggaaccatttgtctatggaatttttccgaagaccgaaaagaagcagaagtcggttatgaattattaccggagtatcatagaaaaggaatcatgtcggaagctttggctgcagtcgtggattttgcatttaaaaatttacatttgctggaaattattgcgatgacgcataaactcaatgaaaattcaaaaggacttcttttaaaacatgattttgtattgcaggaagataggaaggatgaagattttccggagaatctggtttttagcttgaatcgaaggtaattatgtattcagatttatataaagctagtgattttttaatagaatctattgaaaattatctagatctatttgcttccaaagtagattttacagctgaagatgctcttaatgcgatgatatgccattataaagaagttaaaatggtggatttttatttgaatttataccctaaagaaacatttcttctctcctccgatagtttatatattagtctttttggagattataaaagcaatttgcatttttcatttatgcgttctttcaaatttaatgatgatacagatgagacaatagaaattcgattcgaaatgttatttgatactataagatgtgattcaaaatatggaaattatgtttctctcaatgagcgtgatttaatatataatgaaaatgaacacgaaagtttaattgaaaattttagaaatgatccattttatattacaattagaaataaaaaaccaagtacttttgaattgagaataaattataatgtttaaattttaaaaaatgacctggacagaaatattagccccgataaaaaatacagaatactttaccaatttatgggaaaaagtaaagcaggaatatgcagccactaaagtttttccaccaaaaaatcagattttcagagcattagaaattacgccttttgaagatatcgaagtggtgatcatcgggcaggatccttatcataatgactatcaggcaaatggtttatgtttttccgtttccgaacaggtagctgcgccgccttctctgaaaaatatttttattgaattaaaagatgatttaggggttgaaagaacttcaaaagaattggacgattggggaaaacaaggcgttttactgttgaatgcaacattaaccgttcgtgcgcattctccgaattcacacaaagatttgggatgggaaaaatttacagatttcatcatcaaagaaatttctgataaaaaagaaaatgtggtttttgttctttggggcgcttttgcacaaaaaaaagccgaactcatcgatccggctaaacattttatcttaaaatctgcgcatccttctccgttttctgtttacaggggattttttggaagcaaacctttttcaaaaattaatgaatatctggtttcaaaagggaaaaagcctatttcatggtaggattttctcctccttttttaatggtgattcctattttgtactttccgttcaaagcctttgctccgtctgcagaagcaggataaggctgaacatccgttaaagaaatagtatatccgttaaatgcagccgactgatgatagtttctgccttcattgtccatactggctaaattcagaaccaccggtcgggttgcagttcccattacttcaacctgtgccacggcaacacctgcccaaatgcagtttacatcttttgggcaacggctgtcttcggaaattcctttgaaagttacattcatctgatattcttcaaggaatttgttttcaccctcgttgaaatagatcattccgccttctttactggttactttggtaacgcctgttttatccgtgttcacttttaatttattttctttttgagcattgcagttcattaaaaacaatgagcctaaactcaggataagcattttatgtagcataatttttttatataatattaatcatatctaataacactaccaaaaacattgccacacctaccacaagactgaaacctgttccgtaaataaatcctataaaagccccttttgttgatttcagggctttattcacatccttgctgtcgtgaagaagttctccgataaacactcccgcaaacattcccaccagaaaacccaaagggatgggtaaaaatattccgacaatggttccgataatcgaaccgatgcttccccaacgcgttcctccgtatttctgatttgtttttgccggaattacatagtttaagaccactgaagccacagtaagaattccgaatgcccaaacataaatcataggaagatctgcatctgtaccgtatttgtagatcaaaagtccgcagatactcagcaacaagcccggcaaaacaggaagaaacgtccctaaaattcccagaaacaaaagaataagacaaagaatattaatcagtgtagagtccataatttaaatttatttgcagtatataacaaaagtgactccaaagagccactttatattgataaaaaaattctgttaaagattcaggatcacgtactgtaaaataacacccgcatttcctatgtttcctgcagcatgattatggaaacttgtataataaatatagccgctgtttgaagaaccggagcaaggacctacagttgcgcccaatgcaacaagataaggaaccaaagtctgcggaaccgaaatcgtaatctggatactgcttcccggaatcgtaatgcaaaccggaacaaaagttgtgttcggagcatttccgattggcgttaccggaattcctgtagccgtaaaatgattcgttctcaacatcaatgcctgattggcgccgtcttttaccagaacttcccagtaagaagggtcataattggtaattttttgccatgatcccaaatcaaaatcgatattcagattgctgaaaccaagtgccgaagacaatcctgcgttgcttaccacagccggaacaatgcccgaatttcctgtgttcgtagaacaaagttttgaatcgggaacaaatcctcccgctggagcgcagcttgaagtattgtctgtaccacccactaaataagaaacatcccaatctgaagcatagatacttccgccattagcaacgaagatcgcaaggtttgcatcgattgcagggaaaagtgcctgattggtagagtattttctggaaccgcagttcaggaaaataatatcatactgtgcaatggtatttaaatttgtaagatcattattcgtgatttctgttgcggtatatcccaaagaaagaataatatcttcaattttatcatacgaaccttttacataagcaattttagctacctgattcagtttggtctgagacagatccagcgttaaagtttcgttattttttactgttgcagcaacttctgtacggaaattgcttccatttccggtctgaatatgaatggtatgattaccgaccggagcgtccaatgtaaaattaccatctgcatcggaagtagtgtagtagatcttatatttgtcatcgaaagtaaaaacggatgcgccaccaatggctttggctccgttttgtgacattacttttccggttatttttccggtttttaccgtattatctaccgtggcttctgtaggagaagaaggatccgagtgacaggaacccaaagaaaaaaggatgataaaaataaaaaagaggttaagttttttcataaatcatagtttttaattacgagactaaattaatgattttgttattaaatatattaaaattttaaaacaattttaaataatcgttaattaattttcaattgttttgtgaaaaattcttatttaatcggtgttggaaggatttaattttttactaaatttgttagaatgaatgatcagttacaggaaaccaaaaatttcatacaggatttaagcgaacagctttatttatacattaccaaaatttctccggcaggtctggattgggtttttcatgcctttacaaaacttgcgattcttgttattgtatttttgctgatagactttcttgtaaaacctgtaatcaatcttatcttccgcttttttcataatgaagaaaaataccccgtaataaaatcaatttatcagtcaagaataacaaattctgttgcacatctttttgctttggcaattgtactgggaattcagacctctatatttccgcctaaagcaattcccagaaccaatatctttattatacgttccattaatttaggacttgtattaatccttgccggaatgctctatcgtggtcttactgctttcagaaattatttcgccattaaacaggattattacaaaatcatggcattgaatgcgatttctgaaacaatgaaaattttaggaatcttcattttttctattgtaggaatctgtgttattttcgggattaaaggagctaccattgttggaagtttaggagcaattacagcagttctggtactggttttccgcgataccattctcggatttgtaaccggaatccatgtttcaacttctaaaagtcttaaagtaggagactggatcagtattcctaaatacaatatcgaaggaaatatttcagacattagtcttttaacgacgaagatcatgaattttgataaaaccatttcttcgattccaacctatgatcttttaactactgagattaaaaatcttcaggtgatgtcggaatccaacaccagaagaattaagaaatcaatttattttaacatcaattcctttaaatttttaacggaagaagatattgagcgtttgaaagatatcaatctgatctcagaatatcttgaaggaaaaagccttgagctgagaaaagaaaaagaaactttgaagcacagtgataaaatagtgaacggaagacagcttaccaacattggcgttttcagatattatgcagaaaaatatctccagaatgatcccgatgtagatcaggatggtgcaatgatggttcgtcagttggatattactccgcaaggtctgcctttagaaatttactgtttcgccaatgattcgcgttgggaacattttgagcagattcaggcggatatttttgatcatttactggttgcttcaaaggaatttgatttacaggtgatgcagatcagtgtgaaggtgtgatgaaagctcgaaatttatttcattactttttatcttttatatttctaaaaaataatttctcgcagaatttttttgtattttagctttatgactaaaatacaatgggtggattgtcacagaatgccctcaagatcatttttttacaagaataagcagtttccggtgtgtgcaagatgtaccggtatttatttgggatattttgtcatgattcctttattatggttttatcagataagtattctgttaagtgttgtgcttgttcttcctacgtttgttgatggcttaactcaggcttatctcaacagagaaagtaccaactttatccgttgttttaccggaattctcgcaggagtaggaatgagcggacttagtgaaagaattacctatcatacttataaattcattgaaacattaataacttaaactatgagcgattttaatcaaaattaccaaaagcctaatcagtctaatgaagacctgcatatagggttgaaaattttatcattctgtattcctttggcaggtgcaattatttacttcgtaaaaaaagacaaagaacctattgcagcgaaatcagcatgtaatatggcacttataggacttgccgtaaatgtagttcttactattataagacttaccttacagaaataggaaaaatcttaagattataaacccacttttaagttgggtttttttatttttgcagtatgacaaaactaagtgtaaacattaataaaattgcgacgctgagaaatgcaagaggaggagaaacacccagtgtaacggaggcagccgtaaaaattcaggagtttggaggacagggcattaccatccatccaagacccgatgaaagacacatcacaagaaaagatgtttatgatctgaaacctttggtaactacggaattcaatatcgaaggaaatcctcaccgttcatttatcgatatggttcttgatgtaaagccggaacaggtaactttggttcccgatgcagatgatgccattacttcaaacgcaggttgggacacgaaaaaacatctggattttcttacggaaattatcgcagaatttaaaaatgcaggaatccgtacttcaattttcttggatccgactccggaattggtagaatatgctgccaaaacaggaaccgacagaattgaactttacaccgaagcttacgctaaaaattatacccaaaataaagaatctgccataaaaccttattatgatacggcggttgttgctacagattttggattgggaattaatgccggacacgatttaagtttagaaaatttaaaatattttgcagataccatcccgaatttgcttgaagtttcgattggtcacgccttggtttcagaagcattatatatgggaatggaaaatacagttcaggcttatctgaagaggctggcaaaatggtaaaaatcgcaagttatatgtgaagctaaaggtttgataaatattttctaaacttcctgcttccatcaccccgcttctatctaaaaacaaaacgtatggaaattttaaattcaaaaatatttggcgaaaatctttcgtctacaccgcttttggtatttcacggtttatttggaatgcttgataactggggaaccttcgggaaagatttcggagaatttgtaccgactcaccttattgatctccgcaaccacggaagaagttttcattccgatgagatgtctcacgacgatttagcggatgatattcttcgctatatggagcattacggcatacagaaaacacatattctggggcattctttaggcggaaaagcagtgatgcagtttgctattaaatatcctgaaaaagttgaaaagctcatcgttgtggatatttctccgaaagcatatcctccacatcatcagggaattatcaaagctttggaaacggtagacttcaatactgtaaattccagaaataatgtggaagcggttttaagtcagtatattcctgaaagatcaaccatacaattccttacaaaaaatctgtattgggacgataataaaaaactcaactggagatttaacctgaaaaccctttctgaaaaatacaatcagtttgtttccaatgcgataaagttcggcgttttcgaaggagagacattgtttatcgcaggtgaaaagtcaaattatattcttcctcaggacgaatttgccatcaaacagcaattcccaaaagctcagttttcaacggttaaaaatgcaggacattgggttcaggctgaaaatcctgtcgattttgctaaaattgtcaaagaatttttgaatattatatagcataaagtgtttattttggttaaattgttaaagttttcttaaattttgaatttattcttctttgtgtgatattttttaatattttagtcgaagctaaatcactaaatattaacatcatggaaaataagaaaaacaaaaagccgttcttcgcatcatttttagaaaaacaaatcgcagaaccggaaaaaatcaaaggaggatctgaaactgttgccacagctccgttaaaagataatgttacaacagcgcttcaggacagcattacaaaaccttccaatgataatgttaccatgaaatatccttccgatggcgatgaaggaggtacagaaatctaaaaacgaacaacccaaaataaaacaactatgaaaaacaaagattcaaagaagaagccatttttcgcttcatttttagagaaacaattacaggatcctgaaaaaattaaaggaggagcaaatgtaacaattgcttcgcaggatacggttacaaaacctgctgtagatactgtgacaaagccaatctatgatatggcgcagacaatgaaatatccttctgatggggatgatgattctccgtcaatttaatggatttatcttgatcacattaaaaaaatcatactaaaaggaaacttacactctaagtttccttttttaataaaaatggcagatgattctttgcattacacattctcaggatttttacaatattgatatcttttttgaatatttaaaatctaaaaatattccttttttcagactaaattctgataaaataaatcattatcagaaaataagcatcagcgaaaacttttttgaattaaccgatgaactcggaaataccgttaattcaaatgaaattaaagcggtgtggcacagaaaatcatggggaatttctgttcctgaggaactggatgaaacctacacaaaaatttttctgaaagaatacgctgctctcagatacaatcttttcaccttgctggaagaaattccgtggatcaatccgtttgagaatgaaaataagattgatagcaacaaaatgtatcaattaaagatcgcccaaaaaaacaaccttactattcccgaaactattttttcgaacaattcagaacaaataactgagtttttctatcagaaatgcaatggaaaaatggtggcaaaacttcatggtgcgctttcaaaaacaatgagcggcgaaaatttcctttccaccaacatcatcgatgaaaattctctcgaaaatatagaagacatagaatactgtcccatgatttttcagccctacatcgaaaaagaatatgaattgagaatactgtatcttgacggagaattttttaccggaaaaatcaataacagcgaaaacgccgactggagaattgtcaacgaaaattatttttggtcagaataccatttaccggaatatattaagaccagtttaacctcaatgatgaaagacatgggattgtacatcggagcaatcgacatgataaaaggtagagatggaaaatattatttcctcgaagtaaatccgcagggagaatggggaatgctgcaaaaagaacttaatttcccgattgcggaaaaaattgccgataaccttataaaaagaatgaataccaatgaataaaattttaataattacccatacaggagataatttttccatagaaaaagtaactgaatatattgctgagaacaattgtgaagtcatccgtttcgacgtagatttataccctttgcaaaataaattatctacccgttttgaagacggaaagtggatcagtattttagaaactccagaaaaaaaacatcgtttagacgatatttccgcagtctggtacagaagagcctacaatattggatctggtctgaaagaagaactggattctaaattttacggagctgcgatgggagagatcagaacgacattatttggatttttagagtctattgatgtttatgcattcggaaaaccaagtgtttacagaagagtagacagtaaggaagaacagttgaaaatagctcataaaattggactcaggattccggaatcctgccttacaaataatccggaagaggcaaaacaattcattgtaaaacataaaaatgtggttgccaaaatgcagacaggatttgccatttatgaggacggtgtagaaagtgtggtcttcaccaatgtggtaaaggaagataaactggaagaacttgatacacttttgtactgtccgatgcagtttcagaaaaaaattgaaaaaaaaaaagaacttagaatcaccattgtcggaagagatgtttatgctttcgaaatcgattctcaacagtcggaagccgcaaaaatagactggcgaaaagacggggtaaatcttattgataaatggattccgacggatcttccgacagacatcgaagcaaaattgctggaacttctggatgtttacaacatcgattacggcgcaattgacatgatcgtttcgccggaagatgaatattatttcattgagatcaactgtgccggagaatttttctggctggataatcttaccgaaggaaaccttatttccaaaagcattgccgatattttatgcgataaagctccaagaagaaacaatatggttttggtttaaaattcttccaacacaagataatacagaaaacgggtgaaagtccgtttttttaatttatcttcagttcgggataagaaataaatttaagtatttgatttatagtattatattgaattaccgcaaagcaaaacaaaagattttttacttattgaaagtttgtaagctaaacaaaggcacttcgtttattcaaaaaacacaaaaatagtattactttaataagttttacgcctttgtatatcttaaaaaatgaattcctgatcattgaatctctttgttttaccttgcgtttaagaagacttatcccgaactcaggttgatttaatgaccatcttatttattgctcaaaacagagacacaaaacttttgctgtttttatccatttaaaaaacagaaatctcccttaaaaatcgcaaatttgcataacgtagaatattatcataatttagtaagcaatcaagtaaaaaaaattgatggtttttgtaacgggagcaaccggaattttaggcagagtaatcgttttggaacttctgaaaaagggaaaaaacgttcgtgcagcaaaaagaccgacgagcaatttaaacgaagtaaggcattcctatacattttatacggaaaatcccgatgatttcttcaacagaattgaatgggttgatgtagattttaatgatatatattctcttcaggaagctttgaaagacgtggacgaagtatatcactgcgctgccaaagtaagctttcatcctcatgacgaaaaagaaatgtaccgtaccaatataaaaggtacagaaaatctcctgtacgcctgcgaaggctccggtgtgaagaaatttcttcacgtaagctcaattgctgtccttgataatttcaacgaaaaaggagagctggacgaagaatccgatttcaatcctaaactggatcattctgcatacgcactttccaaacacctttccgaaatggaagtgtggagaggttcagcagaaggtttaaacgttgttattgtaaatcccggaatcatcatcggaagcggaaactggggaaacagcagcggagctgtttttcctaccttcgaaaaaaacagctttacattttctggcggatctagttatgtggatgtaagagatgttgcagaaatttccatagaattaatggaaaaaaacatttttggagaacgttttattgtaattgcagaaaacagaaggtacgcagaattaggaaaacaaatcagatctaaattaaatttaaaagaagctaaaattctttcagattttcagctcaatatcggagttttggcaaatacattattcggctggttgattccgactttaagaatggcaacaagatccaatgtgaaatcaatttcagaaatgaacaccgtttccaacgaaaaaataaaaagcagattgaattatcagtttattcctctttcggaaagtattgattttcatttaaataattatatcaacgataaaaagataaagcaatgaatcttgcagaggcaattatcttaaaaaatacagaaaagcatcccataaaatctgccatcggatttaaaaagaaagatgcaggctggaaagaactgagctggaaaaaattcggcgaaattgtgtataaaacagccaatgcgcttaaaaatgcaggaattcaggaaaatgataaagtcgccatttattcggataattcttccgaatggatgatttttgatctcgcagtattagcaatcggagccatcacggttccaatttattccactaataatgcagaacaggcagaatacatcatcaacgattcggaagcgaaggcaattttagtgggagatcaggctcagtacgatgcgtgtctggaaattttgaagaaagaaagtacaggtctgcaaacgattatcatttctaaaaaagcagtctggatcaagaaagaattcagcagtttttatctggaggattttatcgctaaaagttctcccaaattagaattctgcaagaaagaatatgaagatattgccacgcttatctacacttccggaactacaggaacaccaaaaggagtcatgcttacgcacggaaatttcataaaagcttttgatgcgcatttcgaattttttaagtttaaaaacttcgaagaagaactttctctggcatttttacctttaacccacgttttcgaaagaagctggagtttattatgtctttacggaggcgcaagagtgtatttccttgaagatcctaaaaatatcgccaatgctttggaagaagtaaaaccgaccatgatgtgcgcggtgcctagatttttccagaaagtctacgccggagtattggaaaaggcagaagaaggttcatcgctgaagaaaaaaatctttaactgggcattggaaaccggttcgcagaccgcagaattaagaagaagagaacagccggttccgtttggattaaaaataaaagaaaatattgccgaatctttagtttttagtaaaattaaagaaaaaatgggcggaagattgtggtttctgccttgtggaggagcttcattatctccggaagtgacaaagttttttgaatcggttggaattcatgtgacggttggctacggtttaacggaaactacggcaactttaaccgcttttcctttgacgaattttgaacacggaagctgcggaaaacctcttccgggcgtggaaatccgaatcggggaaaacgacgaaattcaggcaaaaggaaacggaatcatgaaggggtattacaaaaagcctgaagaaacgcagaaagttttcaccgaagacggctggtttaaaaccggagatgccggaaccatcgacagcaaaggaaatcttaccattacagaccgattgaaagatctcatgaagacttccaacggaaaatacatcgcaccgcagcagattgaaaatattttaaccaacaacaatttcattcagcagattgtcctgattgcggaaggaaaacagtttgtttccgcgttggttgttccgaactttgaatttttaaaagaatatctcaaaaaaaataatattcctttcaccaattgggaagaaattgtaaaaaacgaaaaaatacacgatttttacaaagacaaaattaaagaactgcaaagccatttatccgattacgaaaaagtgaaaaaattcactttgatgccttcggaatttgatatcaatacaggagaaattactccgacattgaaggtaaaaagaaatgtagtgcttaaaaaatatgcagatctcatagagaagatgtattaaatttttaaggctgagttgaagattgagctgtaacaactgtacattaagccagatctcaccttgcaaaaattgaaattatgacaacacaggaatttttaggaaaaaaagattttacaataaacaatcagacggtttcagaaagctgtccttccaatattgccttaattaaatattgggggaaatacgacaatcagattcccgccaatccaagcatcagttttacattaaatcattgcagaacgaatacttctatggagttttctgccaatgaacctttttctgtgcagacttttcttgccggaaatgaagaagtgaaatttgccgaaaaaattgaaaaatattttcgaaatatcgaacagtatcttccatggattttacaggggaaatacgtcatcagaaccgaaaatacttttcctcacagctcaggaattgcaagttctgcctcaggtttcggagcgatagctaaatgtttaatgaatctggatgaaacattttcaggcaaaacttcggatgaagaatcgttgagaaaagcctcttttttagcaagattgggaagcggaagcgcctgccgaagtctttataatgggctggttgtgtggggcgaatctcaggtaaaaggaagttctgatctttttgcagtacagtatccgaacgatgaaattcatgaaatttttaaagattttaacgactgggttttactcattcatgagggtcagaaaagcgtttcttccactgtcggtcatggtttaatgaataccaatccttacgcagacagaagatttcaggaagcaagggaaaatttcggtcccatgaaagaaattttagccaatggagatttgcagagtttcattaaactggtagaacatgaagcattaacacttcatgccatgatgatgatgagcgatcctgcatttattttaatgaaaacaggaactttggaagtcatcaataaaatctgggatttcagaaaagaaaccggtttgccgctgttcttcacattagacgcaggagccaacgttcaccttctcttcccgaacaaaggttcagaagaaaaaataaaatctttcattgaaaccgaactgttacagcatacgcagaacaatggagtggtgaaagatgtgatgaggttttaatttgtgaaaaaatataagggttaaagacatacttaaaatctttaaccctatttttatctatttatctaagattcccctgattttattcgcattggaaatcagttctccaagatattcgaaattttctttttccagtgctgctttaaactttcttaactgagcaatatgctcattaagaacatccaaaacattttctttattttgtctgaaaatcggaacccacatttcagaatgagactttgccagacgaacagtgctggaaaaaccggaactagccagttgaaaaatagtttcttcttctttctccttttctaaaaccgtatttgccaaagcgtaagaggtgatgtgggaaatatgcgaaatataagcggtgtgaacatcatgatcttccgcattcatgtaaatcagatgcatatcaaggctttctacaattttttcaaccagttgtaaagcatcttctgcggattcttccttatcgcagattactcctgcttttcctgaaaaactttctgaaactgccgatttcgggccgttgttttccgttccccacatcggatggaaagccacaaatctcgatcttttcggatgattttttaccgcatttacaattcctgctttggtagatcctgcatccatcactgtctgattttccgaaatcaggtctaaaatattcggaagtaattttcttgcggcatctacaggaatggcaagaatcaccagatcagagtttttaattccgtattccagatctacttttgcatcgattattttgagctctaatgcttcattcagatgctcattgctgttatcaataccgtaaatgaaatctgcaattcctttttgttttaattttaaagctattgagccaccgattaatcctacaccaattatacttattttcatcgtttaaattttaaaataaaaaaccccgcccaaggacgaggttttgttttatctatatgaaatccttatcccagatctgagttaaaaattccgtaataatatgttccgttgtttgtaatcacgagacaaagttaaataattttttttaatcaggattaaaaagtgaattgtgaattttgcttcgcgagtcaaattttttacaggtcaattaacttcgttgtcaattcgctgtgttgttaatttatttcaatgaatttaagaattaaccattgcttgcataacaaaattcactattcaaatcattaaggattgctgataatcaatgttgaaggaatatccgataaccatatgcttttcgtatcgatgaggtttttccagcttttgctgctgatgagcaaaaagtgcatatttgttttattaataaggaaagtaatcgaagtataaagaaaaatatattgtttagataatatcctgacataaaaaataatacaatcagaacacttccaaatcggttcattggttcaaggatgttgaaaagttatattttacatcgtatttaacactaaaggataccattataaatcattacaacaatatttttcaattattttgaggagagaaatatcaatgtcgttgcgaaatctttcaatgctaaaatgaaagattacaaccttgaagtgtaaaaccatctatcagtttatatttatgtggttgtaaatcaattatttgatttggtgtgtaaagaagatttgaagttttctttgaccaaaatttatatcttatgcttttttcttatttaatctaaaataaatatacactttaatccctcatctttagaggtttgtatgcttttaatgaactgtttggaagattattaatactgttggttatttttaatgcagtatttatatgaaatggtgtattgtttagtataaattttactttttataccatctttaaatcagtgttgagtaattttactgcagtattaagcatttttatataccgttaaaaatttttgttgcactgtggaacatttttatcgcagtatggaagattaagatttgtgtccgaaaataaatttttaccgctcctgccatacaattgtcattaccggtgcttatatttgcacttaacgatccataaaaaataataacaatgagttattgcgcggcaattgaaggaatgcagcctgaaagcaggagagaactgcacaaaagataccatgataagtattacggttttcctattcatgatgataatgagctgttcgggagactagtgaaggaaatcaatcaggcagggctgagctgggaaaccattctgaagaaagaagaaggtttcagaaaggcgtatgataattttgatattcaaaaagtggcttcttacggtgaatctgactgggaaagactgctgaacgatcctggaattatcagaaataagctgaaagtaaatgctgctatagaaaatgcaaaaaccattgtagaactgcagaaagaattcggttcttttgaaaaatggctggaacatcatcatcccaaaacgttaccggaatggatgaagcttttcaagaagaccttcaaatttacaggcggagaaatcgtaaatgaattcctgatgagcatcggttatctcaaaggttcccacgcagaaagctgtcccatgtatgatgaggttttaaaacatgatccgatgtggaataatgtttaattgacatttgaaaaggtatataaagtcctgaaaattaattaaaaggatattgcataaaaaagcggactcaaaagtgccattttgaacatacactgaaggtttcaaaatcttaaataatggcataatactgaaaaatagttggtagaatcctatcaaaacctcattgttaggctgtttgtaggaagttttatgaaacgtgtttcataaaactttttctttgtctgaaaaatggcaaaaaaacgtnnnnnnnnnnnnnnnnnnnnnnnnnnnnnnnnnnnnnnnnnnnnnnnnnnnnnnnnnnnnnnnnnnnnnnnnnnnnnnnnnnnnnnnnnnnnnnnnnnnnagtgaaattttgtggtctttaaaaacggacataaatagttaattatcagttataaatatatgaaataaaaaccaaaacaacaattcaattaattgaaaatcatatagttaaattaaaaaaaacattattcaaaataataaaaaaatcttccgaccatgactagcttcgccgccggaaagaccaaaaaccaataaataattacttttcatccaataaatttaaattccagacaataaaatttaatcatttaagttgtagttcacatttaatttaaattaatatctttgaaacatttaacaaaaacattaaacatgaaaaagcaaaatgtatcaactgcatttgtcgcagcatcctgggttgctttaggagccggaatgattggttttattgtaggtcttgcaagagcggaaatgcagcttaatgagaaaggatattatttcacgattcttctgtacggactgtttgccgtggtttctttgcagaaagcagtgcgtgacaggctggaaaacatcaaagtaactgatatctactatggaatctgttggtttgctaccctttcctccattgtgttactggcaatcggcttatggaacgccactattcttccgagtgaaaaaggcttctacggatttgcctttttactggcacttttcggagccattgcggtacagaaaaatacgcgtgacaatatgcttcaggaataaaaaatgattacactctccaaattcggagagttttttttatactacatctttcgaaaaaaaatattttgttaatatttttcattaaaatatgatttttaatgaaaattttaattatttcattacttttacaaaaattaattcacaaaatattaacatgattaaaaaactaataaccgccaatcttttcatgcttttacttcagacagttcatgcgcagaatgaattcattacgatctggaaacccaatacctcatcccataatctgctgaatcctgtaatgccttcaacagcgggagacggacagatctggtttccgggaatcggggaaaattataaaattgtttgggaagaagttggttttccatcgcacacaggaacgatgaatgacgtaacttcaaccgaacgtattcttatagatttcggaactcctctcaatcctaatgcagcagaagctaaatacagagtaaaagtatccaatggaaacggaactttcagacagataaaattcggaaaaaatgtaatctcttcaagccttattgctgatattccagtaatttcaacttcgggaagtaccaataaaattgtagagattgaacaatggggaaacatccagtggacttctatgaataatgcttttgcgcagtgcatgaatatggaacttaccgcaacagattctccggatctttcaaatgtaacagacgtttctatgatgttcaacaatgcttttaattttaaaggcgctccttcgatggcaaactgggacacgtctaccatccagaattttaaatacatgttcgggtatatttctacgccaccaataggctttccgttgattgaatctttcaatgcaccgataggatcatggaatttatcttcagccgaagatctcagttatatgtttaccagaagaaaggccttcaaccagaatttaaacaactggaatgtttcaaaggtgacgaatatggcatatatgtttgccgaaacacaagcctataatcagccaatgaataactggaatacatcaaaggttaccaatatgaccttcatgtttcatttcaatcctgcgttcaatcagcctctcgatcagtggaatacatcgaatgttataaatatgggacatatgttccacggctgctctgccttcaaccagaccattaatgtatggaataccagtaaagttacggatatgaataccatgtttactgaagccacaagttttaaccaaagtttacattcatggaacattccggttcttacatcaggaaataatatgttttataattcaggcatcaattgtgaaaactacagcaatattctttacggctgggctcataatccgaacaccgcaaacaatgtatttttacaaagcttaagtccgcttacctactccggcgcagtggctggtgaaagaaatattcttatcggtaaaggctggacgataacaggtgattctgcatctgagtgcaactttctgggcactttagacatcaaaaaccaaagagataaagaagaaatctatccaaatccggcaacaaactttattttcgttaaaacatctgatgctaaaaattataccatcttcgaccaaagcggaagaatcgctgcaagaggaattttaaccaacggagaaattaatattgactttttaactgccggaaattatgtattacagatcaattccaaaggaaaaagtcagtcatttaaatttattaaaaaataaaaacctcacaaacgtgaggctgtattccaagctgtaaatgatccttattttaaatttgctcaaaataattaatcgatcatttacagttaattatttatcaaaatgatttgggtgctgtgctttgatagcatccactgttcccagaactttttcttttaaagattcctgatatatctgaagattttcagcaacggtttcatcagagcttccgataatttttgcagctaaaatccccgcattcaaagcaccgttcaaagccactgtagctacaggaattccacccggcatttgcaggatcgataatacagaatcccagccgtcaatagaattactcgataaaatcggaactccgatcaccggtaaagttgtgcagcttgctaccattcccggaagatgggctgctcctcccgctccggcaacaattactttcactcccctttctttagcggttttcgcgtaatcaaacattctttccggtgttctgtgggcagaaactaccgtcagttcataaggtatgtctaaagattttaaaaaattcgctgcctgttccatgatcggtaagtcgctctgacttcccattattattcctaccatttttcaatttattagatgttcaaagataaaaaattaaaaaacctcacgcaaaaaggcttaaaagttgttggataatattgatgaagctcaggaaagcttttgaatgaacttttaattgaatatatttgccgctaagaccaccattttgaaagattttaagcttactcttgccattctcaccgttgctgttgtctggggaactacatttttatcaatccgcgttgctgttgaaaccattccggcttggtttgttgcgggaatccgccagtttttggcagcagttatcatgcttttgattttactgtacagaaaacagttccaatggatcggctggaaaaatctggggtatcagcttattttttcttcattgatgctgattatggcaaacggacttactaccgttgctgaacaaacgctgaccagcagcttaacctcattgatcagtgcgacttcccccattgtcgtatttttaggaagtgtggcaataggcttgcagaaatttaccattcgggcaatgattggtcttttaatgtgttttggaggaattttattcatcttttgggacggtatcaacgatcttgcgaatccggattacagattggggattttccttttattgattgccattgcaggatgggcttcaggaaccattttcacaaaaaaaatgaacattcagagtaagaatatttcgctgaacctcttctatcagtttgcatttgcagggatcattcagattatctttgccttgcttttcaatgaaaattacaacttcgaaaattggtctgtaaaaagtatttccgcaatgctttatctttcgctttttggctctgttgcagctttttttgcttatcattatgctttaaccaaagtttctccggttcaggtttctattctggcatatatcaataccattatttccattttcttaagctggctgatccttaatgaagaaatttcagctaaatttatcattgcagcaatattgatcattttgggtgtttttgttattaattacaacagagaaatgttcaaaaaacaacgaattgaataaaaattgattaaaaaatctgccattaagataaaaatccagacttttaactttccgttttttttcctatattgttttcaccaagttattcaatatgataaaaaacgccctatttgcagtttctgctatattaatccttttaacgagctgcgacaacagaaaaaaggaaaatgaccttactttaagagagcagcaattactggaaaaagaaaaatcctttgcccagaaagaatctgaatatcagtctcttttaaaaatgagagacagcatctttgccaaaaaagattcggtgaaaattgtggtttggcctgctgaaatcgccggatcatggacgggaaaagtaatctgtacagagtccaactgcagcgattatgtagtcggagatcaacgtaccgatatctgggaattcgacagcgattctatccagcttgtaaccaaaatcatcaacaacaataatctggtaagactttactctggaaaatttgaaaataacgaggcaaagcttacttttaaaacagattctgcttcgaaaaaacaggttgaaatgaatgtgcttcttaatgatttttcagccaataaaattagaggtacaagaaccatcgcagtagacaataactgtactgcaaagttctctgtagaattagtacgttccaccaaataaacacataatgactttactgagcatacacaacctgagtcttcccatcgaagacccggtacttaaatttcttctggttttaattattattcttgccgcaccattgcttttaaataaaataaaagtccctcatttattggggctgattattgcaggtgccgttatcggtcctaacggatttaatgttttagcgagagacagcagtattgtggtgacaggaactactggactgctttacatcatgtttcttgccggactggaaatagacatgggtgatttcaaaaaaaataaatggaaaagtctcaccttcggaatttatacctttaccgtgccttttgttttaggatatttcggcgcctattatattctacatttttctgtccttacgtctgttctctttgccagtttattctcgtcacacaccttaattgcgtatcctttagtcagtaaattgggcattgcaaaaaattccgcagtgaatattactgtcggcggaacgatgattacggatattcttgcgcttttggttcttgccgtaattgtgggaatgtcgcagggtgatgtcggcacagaattctgggtgaagctttcagtctcattcgttgtgttcggactgattgttttgctgattttccccatgatcggacgttggtttttcaaaaaagtagatgataaaatttcgcagtacatttttgttttggtgatgatctatctcgccgctttactggcagaattggcaggagttgaagccattatcggagcgttctttgcaggattggctttaaacaggctgattcctcacacatcatcactgatgaaccgtgtagaatttgtcggaaacgcgattttcattcctttcttcctgatcagtgtaggaatgctgattgatttcaaagtttttttcaaaagctgggaaacactggaagtcgccggaattatgcttgtagcttcgattggcggaaaatatctttcggcggtagctacacagaaaacattcaggcttaccgaagaagaaggaaagctgattttcggactgagttctgcttcggcggctgcaacgctggcttcagtaatggtgggttacaatattattctttcagaaacggaaaccggagaaccgatcagattattaaatgagcatgttctgaacggaagtattctgctgattctgatttcatgtacgatatcatcttttgtttcgatggcaagtgcacagaaaatagcggaacaggacaatgaagatacagtttccggaaatacgcatgaagaggaaaatattcttttagctttaaattatgaagccaccgttgaaagaatggtgaatctgggaattttaattaaagcacattccaacacagaaaatatattcgcgttgaatgtgattaatgaagataaaaacgaatcttccgtaaaaaatgccgaaaaactgctgcacagcgctacagataaggctgctgccgcggatgtaaagattcagccactgaaaagatacgataatgatgtcatcaacggagtgaataacgttattaaggaacagaatattaccgatatcatcatcggactggaagatgaaaaaggtttttccccttcttttgtgtacaatctttacaacggctatcttcagaacgaccatgtgaatgttttggtgtatcatgctgcacagcctttgtcgaccatcaaaaaatatgcggtgatgattcccgaaaatgcccataaagaagcaggtttctttcatgcgcttttaagggtttggaatatagccagaaattccggagcgacgattgttttttatgcttcggaaactattctggatatccttcagaaaattattaaaaaagccaatattgaagcggaatttattattatgaattcttggaaagacggcgaaaaaaccgctgcggaacttaaagaagatgaagctttaattgtttttatggcaaaaagaggcatgaagtcctatattccgcagatgaggctgattccggaacttttgaaccgaaatcttcgcaataataattatcttttgatttttccgttctccgaatttgatgaaaatgatgtggaaaaacgttccgtaggaaatcatgatgattttatggaaatcggaaatgtgattaagaagatttttaagtagaaggcgacaattatgtatttaatttctaaataaaaaagtgtatttttcaaatcagatataaaaaacgctaaaaatgtcagaaattaaatatggtagaaagttttttgattatgatgaaatagattattatcaaattgaaattgagatggaagatgctgctaacttatacaagtttaaaaaaagatcaaatattgataacctaagatatcaagtaatctgtaataacacccctgaaaacattgatgatcttgattttctcaattttatgaatgaaattggttatagaaaacagagtataaatacttccaattttagcagtgtagataaaatatttgtagaaaagccagccggggaaatgatggctgctggttgcattgctgtttttagagatattctgatttttaagaagaataaattggttaccgggatcgctaaaatatgtttcagttgccataaatatcaattggtaggcacagaagcccaaacagaaaatttcggttctaatgatgattactcaaagcttgcaggtattttatacaatacagaaattaacttatgaaaaaaatagttatcctgttcgtttcacttgttgctttaatgattatttcagttacgatatactggaatcttccgattgaaatcactagaaaatcggatattgaaaaagggaataaaatcattcagaatattaaaagttatgaaaataggtttggcaagcttcccgaaaacagcgattataaaaccttagaaaatttaggtttaccacatgaagattcacgggtttatcttgattataaaacagataaaaaaggtaattttgaacttacttatcttgaaggttttgacggaccttatcttttatggaattctcaagaaggaaaatggacgattgattatccgaagatcctcaagtaaaaagactgccttctcaagcagtctttttcaatgatgttaatcgtaaaattattcggaaataactcttaccatttctttcaccattatcagtttttccatcagttcttccctggattctgccagaacattgatgtgccccatttttcttcccggtttggtttctgtttttccatataggtgaacgtaggtttcaggaagccttaaaacgtcttccattccttcataaaccacttttccggaaaaaccttctgcgcccaccagattcagcattccgctgtagataatggcatctgtatctgccaaaggtaaattttttaccacgcggtacatctgctcaaactgtgaattcgcatttccttcctgactctgatgtcctgaattatgaagtctcggagccgtttcgtttacccagacttttccttctttatctaaaaacagttcgatggcgaaaagtcccggagaatgaatcgcattcaggaatttttctgtgatagaattgatctgctcctcaatttcttcggttaaagaaaccggacagatgttgaaatccagaagattaagcttcggatcggcaaccatttctgttacagggaaagtttttgtttctccgttttcatttctggcaacaataacggaaagttctttatcaatatccactaacttttcgatcacagaatcctgtatccagagatttttcatgtcttcattggtacggattacctgaacgccttttccgtcgtaacctcctgtattcattttctgtacaaatggcagaggcatttttatttcgtcagaacttccgtccattacttcaaattcaggacttggaatatcgtgctccgcgtaaaattgtttctgaagaattttctgttgaatcgttttaatgattttagaattcggaacgacttttatcccctgattttcaagttcggcaagagcatccgcatttacgtgctcgatttcgatggttaccacatctttatctttaccgaaattcagaacggtttcataatcgttgaaatttccctgtgtaaagtaggaaatattatgacagggtgcgtctgaagcaggatccagcgtataaaattcatcatcgtatttcaatgcttcctgaatcagcattcttccgagctgtcctcctcctaaaattccaattttcattttttacttttattttctgttagatttaatatagtttaaaatttaacgctaagctcgctaagagtttttgaaaaatttactcattatttttcgctcgcaaaggcgtttcacacagctataagcattatatttattgaattttatcaattttcagatatcccagttccaccaagttttcctgattttcagcatttgattttattaatgaaatcgaatatttttctttcattttttcaggaagaatatcatttaccttaaaaatatcatcaatgtctacaccgtgtttatcatcaatatgactttccgctcctttgaatcccatggttttataaaattctgtggcttttgctctttttgtaacttccgccatcgaatttccaaccattaaatgctgttcatgaaattcttcaaagaagcctcttttatatcctccaaggttaataaaataaagctgttcttcggatgttttctctcctctttctgtaattttcacttcataaccatcgataaaacgcacttcctgataacagtcgatgtggattttagtatccttccagaactctttcatatccggaaccagatctttcaggctttccgcaattccgaagaaaacatcgtgctgctctatatttcgtcctttcggtgtggctccgaggatgatataaaataatttcatgtaaaattctgtttgtgcaaaaatacgtcaaatttatcttttttaaacgtttggcagactaacgcaatagttttatatttgtaacatgtcagaaatcatcattctctttcttggagccatttcggcaggacttctgggttctttgaccggattgggaggaggagttattattattcctttattaacgctgggtttcggcgttcctatgcattacgccatcggtgcttctcttatctctgttatcggaacttcttccggtgcggcggtagcttttgtaaaagaaggctttaccaatatgagagtcgggatgtttttagaaatagccactacttcgggcgccatcgtcggagctttggtttccggaatgttaaatccgaatacgatcggaattattttcgcgagtattcttcttttaacggttattttaaatttaaaaggaaaaccggatcatcaggaacctattattaaaggaagtctggaagaaaaattaaaattgttcggaacttttcctgataaaggggtggtgaaaagctactccgcaagaaatacagttccgggatttctgatgatgatgttcgcaggagccatgtccggattattgggaatcggttccggtgcgctgaaagttctggcaatggataatatgatgaaactgccttttaaagtttctactacgacgagtaactttatgatcggtgtaacagcggttgcaagtgcgctgatctattttcagagaggtgaaattattccggttattgcagctccggttcttattggggttgtggtaggaagttttatcggatctaaaacgctgatggtttccaaaaccaaaaaattaaagacattctttgccattgtcattacgattctttcggtttacatgatgtacaacggtatcaataaaagcttcagataatgagaaagaatttcacggatgtagatctgaaccgttcggtaggaaatttgctgagactgggagttatcctttctgttgcaacatcattaatcggctttatcaaacttttcacggaaggatttaaaatgcctaaaaaatatacttctctggatatgggagaatcttcggaaaaagtgtggggacacttctggaattcgctttgcaaaggagaaggaatggcgattatccagttgggaattcttcttttggtgttcactccgttaatgagaattattttcgcattgattggttatctaaaagaaaaagactacatctacgtagtcatttcttccattgttcttgcaattatggcaatcagtttctttacggggtatgcgcattaaacttattcagatttcttcttcagaaaatctttttctaaagaatcgagttcgtcctgatattcttttttgttcataaaaactgccggattgtacttatcttttggcttatgctttttgtgtaaatcaaactgacttgcatgggaagcaacccaaatatcgaaatccagatttttcatggcatttaaagtatattcataatctttttcgatagaaggatatgcagtaacttcagaaaactttttgtcaatgataatagtcggcatattcgcaattaaaactttatagcttcttttactgtctttggtttcaaacagaaagctgcatgatcctttcgtatgaccgggatgatgaagcattgttaatttcgcatctccaagcgttactacatttttatcttttaaaatataatcaggttttacaggtttaaaagtaacaccgtattttcccagttcataatccgattttccaccgcttttcaggacatcggcatcggcttcatctacatataattttgccccggtttcttttttgatgtctgccattgcgcccaaatgatcgtaatgcgcctgtgtaagcaacaatattttggtatcctgatatttaaaaccaagctttttaatattatttttaatgatcggaagcgaatcggcaagtcctgtattgattaaaatatttcctttattcgtaacgataagatatgaagcaaggtcgtacgttcctacataatacagatttccggcaatcctgaacggttcgtaagattgtgaccattctttaggatgatctttcggttcattgactttctgagcattgatattggttaaagcaaatactgcaataatcacgacaagttttttcatcattaatttaaatttttaaagattacatttcataaaattctaaaggaagctgatccggatcctgtgtgaagaaaaattcttttccggtgtattcgtctatccttatttcttcacactccaaacctttatgagttaattcttctctcttttcctttacattttcaaccgaaaaagcgagatgtcttaaaccgcaggactccggtctggaaggtcgttgcggaggattaggaaacgaaaataattcaatgacataatgatctccgatcgcaagatcgagcttgtaagactgtctttcttcacggtaaacttcacgaatgatatttaaatctaaaatctctgtgtaaaattttttagaaacttcgtagtctgaacaaatgatggcaatatgatgaattttcattacttaatttctttacaattatcgtttcttctggtatcaattacatactgaatcttccattccgtcccttttttaatgagctggaaactgttggctccgcaatgagagaattttcttttgtagtaaaatgaatacggagtaaaaacactggcaagatttccgtctgtatggatggcttcaatagtaattttttcttcgagatcgccttttgccatttgagaaacagagtttacaaaagcttcgatatcttcggtttttacgccgtcttttgtaatggtctgaagaatcgcggtatctgcaaaagcagatttcatcatttccggatcagaatttttcattccggcaaataaattgcggatgggtttttcaatttctgcattctgattttgttgtccaaagcaaagagttcccaataacagggaaacagcccacattttgttcataggttagatttttttatctgaaggtttaaaataacgaaattttaaatttaatttcaaatgaattaacaaagtttaaacagcaatccgtttgaaaacttataaaattacactaaatttatctgtttatttgaaaaatatatgtggacattttacctgagtctgacctttttattattaatcttaaccatactgcctaaaattcagcattcgcactgggttttccgtgtgcctgaatttggtaaaatacagatcacattttttactgttttcacctttgttttaggattttttgtaaaagattcagcatacttttggtattttcagggacttttaatcttaatgttcattcatcacagtatcattctcataaaatatactccgctttatccggttaagaagttttctcagaagtacaaatcttcagataaagtacattttatttctgccaatgtttatcagtttaatacagaatatgaccgttttattcagcttatcgaaaaatgtaagccgcaaatgttcctcacgatggaaagcaacggagactgggaaaaagcattgcgaaaactggaaaatgaatatcctttccagcataaagtgactctggaaaatacatatggaatgcatttttattccaaattaaaaatcgaaagttcccaaacgcattatttcgtggcagatgatattccaagtattgaagcgcatctgaaaaccgaggatggattttctttcgtattcttcggagttcatccacctccgccaagcccaacggaagaagaaacgtcaaaagagcgagacggagatcttctgagtgctgccaaaagaattaccgaaataaaaaaaccggtgattgttgtaggagattttaacaatgtagcgtggtcaaaatcatccattcttttcaggaaaacaagccaccttatcgatccgagaatcgggcgttcttttgtttccacctttcatgctaaataccgattgctgagattcccgattgatctgatgtttcacagtgaagaaatttttattgaagacctgaaaacgcttgaaaatttcggttcggatcatctacctgttttctgtgaatttttcattgattatgaacaggaggaagaacaggaggaacgaatcgattatgccacagcagaagaaaaagccgaagctgaggaaatgattgaggaaggaaaagaagaagatggagagcgtgatgcagtggtgactgaagactaaagtgatataagtctcataatttattccatagaacttaatagattttctatagaataaattatgaacactttactattttgtaaatcaaccgaaattaaaaattaacattccggaacattcaccgcaattgccaaaccgccttcggaagtttccttaaaacggtcattcatggataaagcggtttcccacatcgtctggattacttcatctaacgttacttttgcttttgcaggatcactttccagtgcaatatttgctgccgtgatggcttttatcgctcccattgtatttctttcaatacaaggaatctgtacaagtccttttatcggatcgcaggttaaacctaaatgatgctccatggcaatttcggctgccattaaaacctgaccgacagttccgcctaaaatttcggtaagaccagctgcagccatcgccgaagaaacgcctacttccgcctgacaaccgcccattgcagcagaaatggttgcattttttttgaataatgtaccgatttctcctgctactaaaaggaatctcacaatgtcatcttcgctggtaaattccgtaaaagcctgtgcatacatcaaaaccgccggaattacgccacttgcaccgttggtaggagcggtaatgattcttccgaaactggcgttttcttcattcacagccaatgcaaaacaggaaatccatttattgatattggtgaaattttcttcggcttctacaacctgctgaaaccattcatctttatttttgtagattttatcgcccagtaattttctgttgattccggctgcacgacgcgtaacattcaatccgcccggaagagttccttctttattgacacctttgtaaatgcattctttgatttgctgccagatgtaaagtgcttccgctcttgtttcgtcaggtgttctccagctttcttcgttgattaaaattaaatctgaaatacgttttaatccaagcttttcacaatattttacaatatctgaagatttatgacaaggatataaggttcggacacaatgtttctgaatcgattttttttcctgactcatgataaaaccgccgcctacagaataaaaatcctgcacaagctcagttccgtcttcaaaaacagctttgaaaatcattccgttgggatgatattcaagagattttttcatattaagcaccaaatgatgcccataaatgaaagggatttctttttcacctcccagattgaggatttgagtagatttaattttttctattttttcatcaatttttgtggtatcgattgttttaaaatcttcaccattcagtcccaacattccggcaatatcggttccgtgaccgatccccgtttttgccagtgaaccgaaaaattcaaggaaaacttcttttacctcttcaattgatctttctcttttaataatcctgatgaatgcagatgccgcattccaaggtcccattgtgtgtgaacttgacggacctattcctacttttataatctcaaaaaccgatattgattccatatagaaaattgctcatttttcctaaacgcaaagatacacgataaatcgagatgcaaaagccggagttgaaaattcagctccggctttctaattaaaactatatgaacacttgcagataatcttttttgtgtaaatgacgaatggtgaatttgcttcgcattcaattgtgaattgtttttaagcttaaataaattaacaattgaccatttattattcaatattctctttctcagcagagactttcttcatgctgcgaaatatccagtcccatatcttcggattcttctgaaactcttaaagtaataatgctgtcggtaattttatacaaaagtaatgacccgaaaaaagtaaaaacagagaccaacagtaacgcagccatatgatgggcaaaaacttcaaagccgccatgaagaagactcgcattttcaccgtgtgcaaaaattgcggttaagatcatacccatgattcctcctactccatgacaggcaaaaacgtctaatgtatcatcaattttctttaaggctttccaattcaccattacattagaaacaatagcggaaataaaccctataaaaagactttctgaaacggaaacaaaaccgcaagccggagtaattgcgactaaaccgacaacggctccgatacaggcacctaaagcagaaacttttcttttattaatcctgtcgaaaaagatccacgtcatcatcgcagaagctgaagctattgtagtggttccgaaagctgttgctgccgttgcatttgctgctaaagctgaacctgcattaaaaccaaaccaaccgaaccagagcattcctgttcccaacatcacgtaagaaatattggaaggatcgtgatgaggttttttcctgtttccaaccaccattgcgcctgctaaagctgcaaaaccggcactcatgtgtacaacagtgcctcctgcgaaatcttttacgccaaaatatttattcagtaatccgtccggatgccaaaccatgtgacaaagcggagtatagataaacagactgaaaagtaccatgaataaaaggtaagagatgaaacgcacacgttctgcaaaagaacccgtaattaatgcaggagtaatgaccgcaaatttcatctgaaacaacgcaaaaagaataaaaggaatcgtagaagccatcgctttatgcggcaatactcctactccactgaaaaaaggatagctcaaagggttaccgatgattccgtaatgttctccattgatggtaaaaccaatagaatctccgaatgagagggaaaaaccaaccactacccacaaaatagaaattactcccaaagcaataaaactttgaagcatcgtagagatcacgtttttctttcctaccattcctccgtagaagaaagataagccgggagtcattaataaaacaaggcctgccgccgcaagaatccaggcaacatctgcacctacaattttatcctcgcttaaaaatgctccggtattcggaaaatctgtaatgggactccagaatagtccgcctactgcaacaagagcgataatagcgaaagaaacaatccattttaaacctactgtcataaaaaatttgtgtttacccttcaaatgtaaggataaatttttcaaaaacaataaaattcaaaacaaaccccttaaaaattaatacaattttaatttttaaacacaatttcaatccaaaaccccctttaaaatagaagccacttctttaaatttagtaattggaaataaatgagtccctcctttgattacataatcgggtttggaattttttatggggaaaacaatatcacgatctgctaaaatctgtataacatcaggattttcttcaaacttccagtctgagatcttttcaatcgaccattttaaataatacggatctcttaccctgaaatattgcaaaactttaggatttcggggatcaaagaattttcttacgacggaatacatattggtggttctttcgttgaagaaagtaacgggaagaacttttggaatttttgtgagctgtccggctttaataagacgggatttttctttatgggatttaatgcttcccagaataacaacttttctggcaggtttcagcctgttgatttcctgaaccataattccgccgaaagagtatcctaccagataaaacggctcagaatcatcaatcttttctgccattctttttacgtaatctgagaattcttcattttgatgaggaatcagccattcgataaaaaccacttcgtgatgctttggaaattcaattttctccaaaaccttaaaatctgcaccaagtccgcttactacataaattttcatactactaaaataaaaaaatcagtcaaaaaaaatgagcggtttccaaagaaatcgctcattttgatttattaaaaggtgtccttatttctttttaacaggcgttctgttttcgttatccaaaactgctgtggagattctgaactggatatccatttcgtttttaatgaaataatctttcagagaagactggtagaatactttgaaatctcttctgttcagtgagaatttagcagactcgattactacggtaaactgagtaatataaacgtttgcagggaaagtgatggtttttcttactcctttaatcgttacatctccgtaaacggtagaattgtactcgctgtttgccagaggaataattttcgttaaatggaatttcgccaacggaaatttcttaacgtcgaagaaatttgaacttttaagatcgttcgttaattttaccatatcttcatcctggcttgaaacatcacccgccattaaggacttcatatcgataacgaattctccgtccaccaaaactgttttatcaaaagtaaattttccacttttcagctttatggttccggagtgggttgtaggaactgtttttacaactttatatccccaccatctgatgtccgatgatgttacttttaccactttatctcctttcttctgagcgaaaacaaatgacatacttacgcacatcatagcaaacaatagtaatcttttcattcttttttatttacaattcaacaaaaataaaaaaaagtgtagaacttctacacttttaacaatctttttttgattaaattatttagctgttacctttacaagcaaatccatatcatctttcacaagaacatcctgcattgtagatttgtaagccacatcaaatttctgtctgtcgatagagaatttgttagacattaagcttactgttccgtttgcgtatgtaatttttgcagggaaagaaatagcgttggtttttccttttaccgttaagtttcctgtaactaaagaagtatacactttatcgttgtttttctttactccggtgattttgaaagttgccgtaggatatttttcaacttcgaagaaatctccgtttttaaggtgaccgttcagtttctgctgatattctccggaaagatctgttgcgttgatagaagtcatatccaatacgaaagaaccgccaactaactggtttcctttcaataccatttctccggattttacttttaccgttccgttgtgagagcttgcctcagattttgcgattttataaccccaccactgtacatcagagcttactactttttttgcctgtccgaatgctaatccgcttgctaaaactgctaataaaaatatttttttcatttgaataaaagttattttcttgtttgttatttactggtgcaaatgtaactaactgctttgagagatttcattgatgtacatcaataaatacattttttttcatgagtaatatcatccataaaaaactccgaatttcttcggagccttgttttattcttgatagtaagcggtgtaaagcgctgcaccattcagtgccgtatttggatttctgttcagataaatcggaatgtttctcagcatttcttccatcttatcgctgatcttgaacttctcgtaaaatttatccttgttaatatagtctgcaattgtttgcggaatatctccggaaatgaataaaccaccggttgcttttaatttcaatgttaaattgtttgcctctcttgctaaaaattcaaggaaagtgtccagcgcaatcttacagataagcacatcttcttccactgcagctttgtaaagttcttccacaaagttgccatttgcgaaacgatcggcaagccattccggttccggatgtcttttcacgtctctcaggaatctgtaaatattgaataaaccacctttagacaatacattttcccagcttacgattccgtaaatattattcaggaactgataaaattctacctcaacgtttgttcttggagagaattctgaatgtcctccttcggttgcaaaaggtctcagatattttccgtcgaagaaatatccggcttcacccagaccatttcccggagcaagaatcgctacgttgccgttttcaagatgtccgcttgtgtagatcgggtcaagatcagaatcttctaaaagccccattccgtaagccgaagcttcaaggtcattcagcatatctactttttcaaaacctaaatctcttttgtattcttcaacatccagattccagcctaatcttgccggactgctttttccgttcagaacaggtcccggaaccgctatcccaagcctttttacgttttcaagctgattgtcctgaataaatttctttaaaatttctgtgaaagaaccatattctttggtaaagtatttattctggattttaatctcaagacctccgttaccggagacgaaatatcctaaagttgtaatatcttcacgaaggtttgcgccaatgatagaaacgttatcattgctgtcgttttttactcccggtaaataaagtggaaattttggattcaaaatcataacctcaaattttatcaaatataataatatcttttgtaaattttcgttagaaataaaaaaccttctcaaaaaatcgaaaaggtttggttaataattgcttatatttaaatctaactactttcctaatggaatgttgtaagaaaatcctaccccaatgttgcccacattgtagtcctgattaggcaaatcgcctttgcttcctacaaaaactttctggtactgtacaaagaaattccagtcctgattgtgatatccgatctccggtttcagataaaaaccaccgttcggtctgtctaaagcaacattagaagctaccttatcatcacctaccaaaaacccgtatcctaagtctgtaccaaagtaaaatcctgtctgtttcggataaattctcaataaagcagctacaggaactacccctacatcattattgttatatccgttgttatcctttccgaaatagtgagtatatcctgttgcaatccccaatccgaatcccggagttacaaggttctgataggctacatccactcctactgccatagaagtattgtcagaaggaactgctaaaccaacatttgctcctacctttatcatattattcatctgtgcactttgcgcgctcaatgctcctgcagtcaaaattccggcaaataaaattgcttgtttaaacattttcataactctgattttttaaattttactacgctgaaatatgtaaaaatcgtgccaagcaaagcctttacagcaactttaacaatgcttaaaaccgtaaaaaattgaaattcaattcattattttgattaaaaaattaaataagcgtttaaaaaaatcgtttagttttcagctaaaggttaaacatttaatcggaatatatttaaaaacagctctcaatattaacaatacttaaccgttattaattttaaccttacttcatcacatccatcaaaaagtaaataattgatatgaattctccatcgttactcaacaataaacaccttctctggcgcgcaggattcggaccgggaatcaatcagcttgaagatcttcataaaaaagatattaaaagcctgatgaatgatttgtttaaagaagaaacatttctttatgtaaattatgatacgcccgatattgcagaaaccggagattacatgatgaatgatcagactccggctgaaaagaaaaaagaaatgcagagaatcagccgacagcaaaacgaagagctcaatctgaattttcttgataaaatggtgaacagcaaagagcagatgagggagaaaatggcttttttctggcatggtcattttgcttccagagtggtgaacccgaaatttaaccgacagattttaaatgtgatccgaaagaatgcactcggaaactttaaagatctcttatttgaagtcagtcaggctcctgcaatgctgaattttcttaacaatcagcagaataaaaaagatcatcccaacgaaaattttgcccgtgaagtaatggaacttttcacaatgggacgcggaaattatacagaaaaagacatacgagaaggtgcgagagcttttacaggatggggatcggataaagaaggaaattttaaagaaagaaaaaatcttcacgatgaaggctcaaaaactttcctcggaaaaacaggcaattttacaggtacagatgttttaaatatcattcttgaacaaaaagcgaccgcaaaattcatcaccacaaagatttataaattcttcgtgaatgaaaatgttgatgaaaatattgtaaaatccctgagcgaaagtttttaccagtccggttatgacattaaaaaactcatgatggatattttgtcgagctcttggttttatgataaaaaaaatatcggcaaccggataaaatctccgattgaactcatggcaggaatcatgcggtcgcttcccatgaatattcagaatcctgaaaacctcatcgtttatcagaaattactgggacagatgcttttgtacccgcccaacgtttcaggctggccgaacggaaaatcgtggatcgacagttcgactttaatgttaagacttcagattccgcagatatggtccggcttgcgaccgttagattaccgtccgaaagaagatgatgatttggatatgggtttaaaaaacaacacgaattctttaacgaaaagttttaaaaatccgaatattacgatcgattggtctcgtgtagaaaagatttttaacggaaagaatgtggaggattatttaattcagagttcaaaatctctggatatgaattcggtgaaaaatttctcagacaacagcgtgaaaatgaatgtcattaatctcatgtcgacaccggaatatcagttaatgtagttttcaggtcgcagtagcagattttagtttaccgttaaaatagagctttaaaacctgcaacctgtcatctttaccctaaaacctaagcttatgttaatcaaaagaagagaatttctaaaaataagttcattggcaaccgcatcgtttctgatgccaaatttcctgaaagccatgacattcgatgatgcactggaacccaatcaaaaaatattggtggtactgcagtttacaggaggaaatgatggtctgaatacgattattccgacaaaaaatgatatttatttcagggaaagaaataaaattgccattcagaattcaatgcagcttacggacgaagccgggattaatcctgcactctcctatttcaaagaactgtacgatcagggagaactttccgtgatgaataatgtcggctatccgaatcccgataaatctcacttccgaagcatggatatttggcattctgcaagcagaagcgacgaatatcttgaaaccggctggctaggaagatttctggatgaagaatgttacaaatgcgatcatcctactcaggctctggaagtggacgatatgctgagtttagctttaaaaggcgaaaacaacaaagcatttgcctttaaagatccgaaaagattatatcagaccagtcaggaaaaatatttcaaatcactctacgatcatcatcatgacgacgaaacagtttcctacctgtatcagactttaggttccaccatcaacaacgcaggatatatttttgagaaaagcaaagcgaaaaaaacagaacagacttacccgaattctcagctcggaaaagactttaaaacggtttcttctttaattaaatctgacattaatacaagagtgtattatctttccatcggaagttttgatacccacgtgaaccagaatgaaagacagcaaaaactgtttacagacatcaatgatgcggtaaaagcgtttgttgcggatatgaaaagcaacggacttttcaatgatattttattgatgactttttcagaatttggccgccgtgttgctcaaaatgcaagcaacggaaccgatcacggaacggcaaaccagatgtttttcatcagtggaggtttaaagaaaaaaggaattctgaatgcacttcccgatttacagaatctgaatgaaggcgatttaatctacaccgaagatttccgtaaagtctacgctaccatccttaaaaattggctgaaagcagactcttctaaagttctcggctggaaaaacggggtttatgattttatataagaaacaggatgaagctaattttaaaaataaaaagaggctgttgcaaaaatgaacagcctcttttctataatttaaatctaactacttgtcatgttaattcgtggatgcaggaagttgcttaggatcttcttttttctgacttttctgatcaattttctcagaaatcttcttcacgataaattcgataaccaaaggcgcaactactgctacaactgcttttaatattcttgatttcatactgtttatttttttatgattcatgcaatacaatttctacgccaagaattgttatcaatcttcttcaggaatgataagattctgatagttttttgccgccgctttgaatttttcttctaaccgcaagcggagttttctcggtttatgcacaaccagacattctccaaaccccaaaagaagtctttccagttcaaaattcaactgtacacagattttaaaaatcgtaccctcattactttcgcttacaatttcctgactggcatgaaaaggtttggtttttacataaggtgcattatgagaatctacgaagaaaaccacatttcgcggagccatcgttggcgaaacactcactcctacaatatccttaaaatattcgtcgccgtcgagattcatatcaatataatcgatcttttcctcaatctgaatgtcttccattctgtccagagcaagattatagacatattgcttattggaacagatcaaaaaccagcggttgttaaattccttcagcagctgcggatgaacaatataagaatctgattctcttgccttaaaacttttatacgtgatgttcagtactttcttgtgcaaaatcgcatcatacagaacatcaatatattccaatcctttcaattgctcatttttatctaaatgaataattgatttctggttggtggaatggatggaatcttccagcttctggatcactccgttcatttccttaaacatcgaaaaatctttgaactgttttaaaatctgtaccgcattattcatggctttcagatcactttcattgaccgaaatattatgaatgctgtaatccggatcgctgtaacgatagtattttttttcgtatacttcaatcggtgcttcatatccgaatttttcgctccgcatattctgcagatccagctgtaccgttcttttgcttacaaaagattctttcccttcaaattcaaacaaagcttccgaacattcgtcaataagatcttcgagggtatatttccggtatttatttttcagacatttatccagtgttttgtaccggatgagcgcgtttttgttggatgacatacgatgaggttaaggtttaagttaagattaaggttaagactgagatttagatttagattgaggttgaggttgaatttaatataaggcagtgaaattcccctcctctggaggggtggcgaaaaatcttcgattttttgacggggtggttaaaagttgccatttttcatgaccccgttcttaccaaggaagcactcaatcaatctcttccaaattgtttgagattgcttcgtcatttctgaactgcgttcgcagacctccggtctatttgcaatgacagtttactttctacttaaagcttttccttcaaaataaattccttcccagccggattccataaagtttctgatattctgatgatccgttccttcaggatttttaagaacatcttccctgtaaaattctccgaaaagattcagcgtttcttctttagataaatcatttaatttcgcaaaactaaaaatcttacaggaaccattattctgattggcttcatttactgtatttccgttcgtaaattttgtcggggtaaaatcgtaatgttcatcaataaaagcaattacatccttaaactgaatttcctctgccgatttttctaattgttcaaataacatatcttaatttttatttataaataattcaattttaaaacagaaatccgctcgatcgagcaatatctgtgtagaaaagttttaaaaaaccatttctcgttctttaaggacactattttttgaaatgattcggtatccactttagagctttatttgttcctcacaaaaatctttgatttttaaatctgatgtgttataaaatatcctcaatcatttaatcttaaaactaatgtgactcatgtgtctacaaacttttatgccttttgtggttaattcgtcaaaaataattaaaataattttatctgcgcaaaaagattgcatactttaatccttactttgtatcatcaaaatgagagaacacatggaatttaacggaaatcatttaatcgaattaggatacagaccagcgaaatggtttaaagaagcgattgaattcatcaacaaaaataatttagacgaaactcagataaaagaatatctggaacagtttaaacagcccgaactgattccgcttcatgaaacggcaaaagattttgtgatcaacatcagagcagaacacgaaagtgaaaatgataacgtagaaaaagtaatcaacaccatgaaagtcctgatgaaaacgccgactctggaaaacggagccattatgccggatgcctgtcctacaggtcctgcaggtcatattcctgttggcggtgtggttgtagcaaaaaatgcgattcatccgggattccatagtgcagatatctgctgttctgttatgctgacggatttcggaaaagcagatcctaaagaagtgttggatgcagcacattccatcacgcatttcggatacggtggaagaccgagaggagaacagatgccgatgtctcaggaattaatggatgctttcagagaaaacgatttcctgaatgacgaaaaattaataagcattgcgcgttctcatatgggaactcagggcgacggaaaccatttcctgtttgtcggaatttccaaaaatacaggaaacacgatgttggtaacacaccacggttcaagagctccgggcgcagctttatatgataaaggaatgaaagttgcgaaccagttcagaatggaaatttctcctgaaaccttaagagaaaacgcatggatcccttatgaaacggaagaaggaaaacaatattgggaagccttacagttaatcagaaaatggacgaaagaaaatcatatttccattcatgatgccgctttgaataaattgggaatcgagaaagaagaccgatactggaacgagcataattttgtattcaaagatggagatttattctaccacgcaaaaggtgcaacgcctttggatgataaatttatgccggatattacaggtccgagattgattcctctgaatatggcagaaccggttttaattgtaaaaggaactaccaacgaaagaaatctgggttttgcacctcacggagcgggaagaaatttcagcagaagtcaacataaaaaatcgttggcgcataaaaccattgaagaagtttttgaagaagaaaccaaaggattagacatccgtttcttcaccaatgaaattgatatttctgaacttccgactgcttataaaagtgccaaaaacgtaagagcgcagattgaagaatacggattgtgtgaagtcttggatgaagtgatgccttacggatgtatcatggcgggtgatgttcagaagaatgcaccttggaagaaaaagaagaagtttagaaaagcttaattgttggatatccgcaatggcgcaaattactttaaaaaactatactttttaagacgcaaggattttatctccgataaaatttaaacttaatattagctaaaagtattacactgagcttaccgaagtgtcttacgtcttaaaaaaataaacaattgaaaaaaaacttgcctttttgcattaaccaaaaaacaaaataaaaaataaaactaataaccgaaccttgcaggtgtaaaagcctgtagggtttaatgaaaacctttaatcataaggtaggaacagtagctcagatggtagagcaacagattacttttcgcttttggcaaataaagttcctgtaaacttcaaagttgtgtgtcgcaggttcgagtcctgcctgttcctcaaaaaaattgaagataaattgttagatatacataaaggcgcaatttattttaacaactacaattttaaggcgcaaggattttatcttcgataaaatttaatgctgaatattttagctaaaaatgtcgcactgagcttgccgaagtgtccgcctttttaaaaaactttaaggcaaagggagttcctataaattatttggaaaattactccccgccttttaaaaactataggtaaaaggagttcctataacacttcacttttaatgaatcttactcctcacttatttttttaaactaaaaacaatgaaaacattaaaattattcaacgctgtactggcaaaagaatcggatgctgaagtatttatttctcaggatggtttcatcatcgaacctcatgcaatctgggcaaaaaaagaaattatttcttactacgctaaagaaaagctgaacggaaacgatctcaacaaaaccttccataaatcttggcagaagattaaagaaagtacaagattcgaactgttgatggaacagctctttcattatttttccacctacggaagcagatttcagggtgaagtatacattccggatgaagtgttgaatatccctgatctgaagctgaattttaaagtcattaaagcctgttccgaagaagaacttcaggaaaaatgtcttgctattctaagatcaggaattgctttaaaggaagaaacaattgatgatttgctatctattctgcacgacgaactggaatatgatttcacaggaaaagaaaatatcagaaacaaagaagccatcataaaaattgccgaccgttacgatgtttatcctgaaaataatgttgaatttttgcgctatgtgatctacaaaaccacaaaagaaacattattaattaaaaacaatgatttgattaatgatattaagcaaagcaaattcaatccgacttatctttttgaaagtttcggactggaaaaaatggcggaaattttcaaccgtttcaagcctttatttttagcctataaaaacagagcgccaaaggtgattaataaaatttcgaaactgtcgaaagtttatcacaaaccattaatttcaaatccactgaataacgcaaccaatatattgctggaaaacagcgatctgcactggttggaaaatgccactccgtttgctttgtttaaagctctatcggcttgttattcaagaatgtacggtcaggatacttttgtgtacagaatacggaacggaaaatcgtggacgaaaaaatcaatcggaacttccgtgaatgaactgaactacgattttattttaagctatttaaaatcaaagtatcgttttgaaggaaaaaaattctatttccctgaagacgtagaatttgcgttaccgacttccgaaaaaatgtttgtgggaaatataccaaccggaacaagattcttcggtgaaagattagcggtcggaatttactgggaaaatgcatggggagcttatgatttggacctttcgggattaaatattgccggaaaaatcggatggaatgcagcttacagccaaaatgccggtcaactgatgtattccggagatatgacttctgcgccaaatggtgccgtagaatatctttacgcgaacagaggtttaatggctccgactctggtaatgaacaacgttttcagcggaaacagtgattgtggttataaaatcgttgttggaaaaggcgatgccatttcttacgattatatgatgaatccgaataatctttttgcggaagcaaaatgtaaatccgtacaaaagcagaccgttttgggaatgttgctgccaaaagaaggaagacagtgtttcgtactgctgaatttcggagcaggacatgctcatgtttcaggaaatacagtaatttccgtaatggcgactaacgcattgtatcagcaatggtacgaaccgatatccttcaatcttttgattcaggaattaggagctgaaatcgtttatgataaagaaaatgctgactttgatttttctttggaaaatctggagaaagacagttttacgaagatttttaaatgacaaatttttaaggttaaataattttaacgcaatacacacaaagttatatttattaaaatgattttatttatttgttcgcaagggcacttcgttcagcgaatgataaaaatgtaatttaaggaaggaaagcatattatttatggaaaatgttgcacatagctttacgtcataaacggctgttaaagacttcgcttaatagcagatgaaatctgcccttactttgctttcttttaaagtatatcatcggaaaatagaaactttgcgtataaaatctaaagttaaaatttcaaacagatataaataattttttcacctttttaaaagctcttaaaaacattattatcagtttgtataaagtcattttaaatttaaccgcaaaagagacaaaagacttcattggatttatttaaagtatttcaaaagtctgcaaaaagaaaaaatctttgatttttttaacttatttgctctttctttccatttaagtagtaaacttaagaaactaaagtataaaaccttttgccttttgcggtaaaaagtttagaaaagtttacataaaataatcctgcgtaaaaagattgcgcaggatgttttttattttgtatgaaatttaaaaatcatgacaccaaaaataatagaaaaactaaaagaagttgaagaaaaacgcggtgtagaaatactgcttgccgtagaatccggaagtcgagcgtggggatttgcgtctcccgacagcgattacgatatacgcttcatataccgacacgaaaaagactggtatctttcgccgtgggataaagacgaaacgatagaatttatgacggaagacgatctggacggttccggatgggatctaagaaaaacgttccacttattgttgaagtcgaacgcggctttattgagctggttctactctcctgtcgtttatgtgaaaaatgaaaaattttacgatctgtttaaacctttggcggacaaatgcttttctccgatagccgtattttatcactattcaagcatgagcaaaaaatatctcgaggcatgcagacttgatgaggtaaaactgaaatcttacttttactgtttacgaaccaccttaaccggaaaatggatattggaaaaagggacggttccgcctgttttgtttagtgaattgttggtgttggtcgatgattttacaagaacgaaaatagaaaatttaatcgctttaaaagctaccaaaggagaatcttaccaccatccgaatgactgggaactcttcggatttttagagaaaaccatactggataatgaagaaagagctaaaagtctgaaaggaggaaattcggataaaaacgaaatggagcgggttttcagggaaatattagcagaataggtttaaacagttttagaattagtgcaagagattattataacgtcatgattagaaattcatagttctcaaaagaggaaaacagtttttgtttatccgcttaatcataatgtttaattttaacgcaaagttcgcaaaagtttttgactactaactgcttttaagttcgcaaaggtgcttcgacaagctcagcataaactattcactcatcaaagaacccaaagattttaatgatgacaaattgcagaaaaccacaaaaagtttgatcagacctaaataagaaataagaaaaacatataattcaatgaaaaacctcatcgcgctctctcctatgtacacggaagacagcaacaatctgaaaaaagcatccctcaattcaccctacgagttgagccgattcaatgcaaaatggaatgttccagaagaatttcgtgcagacgtgattgcggtgtatggtgaagatatttatgctgaaattgtggcggaacaatgcagtcttacgttgacaaaacctgatgaagactggctttcaaaagtttcggaggaatttacccaaaggaaaatctcttacggaaggctgaaagatttcgtgcatgaagaaaatattttcatcaaatgttcggattttaaaagttttaaagccggagtttttgacaacgtcaccaacatcaaaggttttgatacattggatctggaaagcagggtttttacttccgaagtcgtagaatgggaactggaagtaagatgttttgtcttaaataatcaaataacaacccattcttcttattggagaaatgacgtttttgacaccaatccgctttctgaaaacgaaaagaaagagctttttgattttttcaaaaatttcattcagcaatacggagaaacgctacccaaagcgattgttctggatttcgggatcatcaaaggaaaaggctgggctttgattgaagcgaatccggcttggtgttccggtttgtatagttgtgatgcggaaaaagctttggaggtgattgtaaaaagctgtataaagaattaaaaatgcagatcatcatattcatcgggattcccgcaagcggaaaaagttccttctacaaggagctttttttcaattcgcacatcaggatcagcatggatttgctgaatacccgaaacaaagaaggaaaactgcttcagtactgttttgaaatacagtccaaaatggtgattgacaatacaaatgtgaccagagaaagcagaagaaaatacgttgagcttgcccgacagaacaaatacgaaatcatcgcatattattttgaaagcagcattcaggattgtctggaacggaataaaaacagaaaagactccatcagcgagatcggaataaaagcaaaatacaaagacctccaaaaaccttccattgaagaaggttttgataaaatattccatgtgaaaataagggagaacaaatttgaaatcagcagttatgaaatttgaagaaattgaagcggtcatgcggaaaaatgaaagcctttcggaacagtatatccttccggaaaactttattatcgtgagactcgacggaagaggatttaccaaacttaccaaagaaaaactgtcgctggaaaaacctttcgacctgaaattcagtcaggcaatgatcgatacgacgaaacatctttttaccatcgggtttagagtgttgtacggttacacacagagtgatgaaatttctctgctgatccataaagacgaccagactttcatccgaaaagtaaggaagatcaattctgttctggcgggagaagcgagtgcttttttcagcctgcagtttcaggaaatctgtgttttcgactgcagaacgatttccattccgaatcgtgaaatgatcgcggattatttttgctggagacaggaagattcccacagaaattccctttcagcctattgttactcgacgttgagaaacaacggattcaacgcaaaacaaaccaccgaaagaattgaaagaatgtcacaatccgataaaaatgaactgcttttccaatacggaatcaattacaacgatcttccgtcttggcaaaaacgcggtgtcggaatttttaacagggaaattaacaaacaaggctacaatcctgtaacacaggaaacggtggattgtgtaagaaatgagctatttattgaaaaaaaactaccaataagagaggattatagagtatttttgagggagatttttaaagaattttaaagcaaatgaactacaaaatcatacacaacgaagaaaaattacagcaattcatagactggcttccggaactactgcccaatgaacaatattacgttgcccttctcgcaagaaaaaaatacaaccccgaaacaggactgaaagcagataaagcacagttaaaaagatttacctcaaccaaagaaagactgcttcataaaatcaggcagctcgaaattccggcaggcttgtacgaatccggaaataccaaagtttcgcaggataaccttgctatttacattactcccaacccacgcgatcttcacaatgcttcattatttttaatgaaagaaatttcggaaaaactcatccggaaagataacgccatcaacccccatacattggctttaaacctcattcagaccaccacttcacgaaaaatattctttgatctcgatattgatttccgcatagaaaaccatcaacaagccattgagaaatttaaactagatattgccgattgtcttaattctgattgtcttacgttcattaaaacaaacggcggactgcattgtttaattaaattagacaacattcagaaagaacaccagaaaagctggtatcagaaagtgtcacagctttcttgcaatgaatatgaagttacgatgaacggcgataacgttttacctatggtaggctgttttcagggaattgatttttcaccctattttttggattaaattatgtgtaaaccgaatactgaattacaattctgcacttgtactgaaggagatatttttgaaataaaaaatatatacatttggtctttgaatagatacgttggctacaaggaaaaaaatccattctttttcgcaagctttgtaaaacccgtagaagattttagtaatacaatctccgcacaaaacataatatcaaaacttaatgaaggtaatatttttgatttcgaatatcttccaaaggaaaaagacacattggatatcagcttcaatgctaaaaatagagctgagtataaatatttcaccataatctttagagatggaatatggcagaaaggacaaaatccgcattacgtcagtgttactgaaaacatcgcaagaggtgaagtgaaagtcacctacaaagaagaaaatgagtttctaaaacatgttgaacatttaaagattaaatatggaattgaaattcctgaatctattaaagttcggtgtgccaatttaaaagacgattcccaagatccaatttatttagctattaggaactttaaagagtataaaactttctatcatccggaatttattaaatacattactgataaatattttaacgaatttcacgaatcagaaaattcaaacgcattgcaatctcttttggataaagcacaaaacacattctctttattagaaaaaaaatttatttctgaaaaaatagatttatcatttattaataaatgtttcaatgaattaaatgataaacttgaatgtgttttcacttcaattcctataaaagatgacgaatacatgattattgatggacgtttttattcaaaagtaattttctcaaaaggcaaacgtaaaacatatttcataaacaaagtaaaaaaaataaattatgaaatatttaaactttttaaagattattaaatgacgatccaggaccttaaaaacaaaaacctcatccttttcgaagccatctccggaagccgctctttcggattggcaacagaaaattcagatacagacattcgtggcgtgtattatttaccgaaagaagactttttcgggttaaactatattccccagatttccaatgaaaccaacgacattacttattacgaaatcgggagactcatcgaactgttacagaaaaacaatcccaatatcctcgaaattatcgccagtccggaagactgtattttgcagaaacatcccttaatggatctcctgaaacccgaagatttcctttccagactctgcaaagacacctttgcaggatatgccgtttcccagattaaaaaagcaaaaggactcaacaaaaagattctcaatccgatggataaagagaaaaaatccatcctcgatttctgttatattttgcaggatcagggctccgttccgttgaaaaaatggctgcgggaattctcttccgccgaaaatcaaaatggtttacaacaggaaaaatgcggcttggtaagcatcgacaataccaaaggaatgtttgccctgttttacgatcaatccggcgatttcagatacaaaggaatcattcagaatctggaagccaatcaggtctctgtttcctccgttcccaaaggacagcatccccttgcctatctcttctgcaacctcgatgcctattccacctactgcaaagattaccgcgaatactggaagtgggtttccgagcgcaatgaagaccgttacaacgttaaccagaaccacggacagaattacgatagcaaaaatatgatgcacaccatccgtttattacagtcctgcgaacagatatttaaaaacaattccctcaatatccgtgttgataaccgggaagaattgctagacatcaaagccggaaactggtcttacgaacaggtcatgaaaaaagccgaagaccttattgcttccattgaaaaatatcatgctgcttctactctacccgatgttccggatctggaaaaaaccacaaaaatcttagttcagatccgcgaggaactctataaaaacaaataaagcttcatttctgaagctttattttatgtattgtctgatatttattttaccaatctgatctccattgcagaaaaacctttcggagatttttccttttcgaaagaaactttatttcctttcttaatctggtcgatgcagttgttgttgtggaagaaaatattttctttagtcttatcttccgtgatgaaaccgtatcctttttcgcttaaaaaagttacaattcctgtttttacagtttcttcagcctcaataggagctgctcccaactgaatattgttgatatcaatttcctctctttcagcctgatccggtggtgtagaagtaagttgtccgttcgcatctacatacatgaacatttcgttcaggcttttccctttatcattattttccttacgctcttcacggcgcattgctttttcttttagtttttgctgttttttcttgaaattttcttttttagagaaagaatctgccatatattttattgaatttttattttacagttatttgaagcttcggaaaaatcagggaaatcgcccttttcaatgatgatatccaccaaattccgaacctgttattaaagggtttctgagtacttttattaatgtgaatgcctatgaaaaggcataaattgaaacggaagtaaataaaatattctaaacgatcacagaaagtaaagacagagatttcttttaataagttaacaaatatacgaaaaataagcataccaaacaaatcttccggaattcaattcattgaatttcaatttattttagagattggtttttaaataaagctttcttgaaaaatataataatgattacagttcggtgaaaaaacaggtttgggaaatataataattatacttaatttgctcaggatataaaactttaccccgtagaaattctgcatattaaaattcagaagctctgcccatttaaagttctcattataatttttaaacaataaaccatgattctcgaaggattaaatacagaaggcgtacttatttttgccaataccaccaagtgtaaaaactattactcggataaagaattcaattacgattatcccgatggattatcagaattattgaaacagggaatcatcaacattattactactgatgaagcagtagaacaagtcgattttacctttaacaaagatgaaatagacctcaatagatggggatttcacaattcttacaactacttaaaagtagaatccggagatgaagtccgcgctgtttctcatgcagattttacccagatgtgccattaatcataaaggtgatttagaagcccatattgacagttcattaccccttaaaaacattttaaacggaagcggagataaaacaaaagaagaatactttaaatatgaattgccattgatagaaataccagcgggaatctggaaattaaatgtttattcccttaaagaagagcatattcttagctggatcgaatttttaatccatctggaaaaaatagaatccgttgatatcgataaaatcaccctgaagccgcttgaaatcttttcttaaatacaaatactttttgagagcagaaataatatgaatgatatagacgaaagcacagtaccccaatgcaaaattgaagaaaagaaattctaatggggagaaccctatacagtgtatactcctgtttttcattttccacattggttaaataccacactggaaaattcgattattttatttggcgaaaataactttaagaatcaattattgatggtatacaatacaatcaataaccatggagaatctgaaaggttaacaaactatcagggagaaacattgaacaggaagtcaatattgtaattgataaacacatatcttaaaaaaaacgaaactttaactgccccttgggaaaaatacaacattggattaacagaggatgattatataaggcatcttgaagataagttaggaaaacccctgtattatgtaaaagtctgactgtcaaataaagtcgtggctattacctcttattgaaaatcttgtgaaaaaatagaatttcgatagcgcggatttgaaatccgtgctatactcccaaaccgcgctgcgcaaagtttcacgactttgagcaatatcaaacccaaacattttttttaaatttatcccgtttctgatagtctccctattttgagcaaaaattaaaacaatactaaatgaaagaaggctatattataaaagatcgggaaaaaccgtattttattacctgtacagtagtagatttgatagatatttttacaagaaaagtttataaagatatcgtagtttcttctttagattattgtataagagaaaaaagaatgatgttgtatggctacgtcatcaatagatgttattaacccaaaatccctaaacaatatgaattttaaaactaaaatagttatgattttattatcctctttattacttacgaattgtaaggaggaaatgaaaaaatgtgtaagccaatctaccgatactaatgtaaaactatataatgatttaacagatcagttgataccttatttttttagagaagattatttaggtaaaaaaaaatattttgatagtttaagagttcataatgaggatttatatatcgaagagaagacaaaagcccacaacgaaatttttaatcatcctgaaaaatattgcaatttgtatatagattctactaaaagtaaaaatacagattttgttacaggtagtaaaaattttattacaggtcatcccgaagctcctataaattatataaaaagtaggaaggagcttttaaaagaattttccaataatacagatattattaaaaaattaagtacacgaagttctataaaagcaaatcaatttaatttgtgtaccgcaaaagtactggatctggcagagtatgataaacatacaaatgaatgtgagataggagtagtatatttttcagagattgtatttgatccttctaaaaaaagagcattagtttttgttgaccatcatatagaaaaagattattacggtagaaatgctgtatttaaactaaaattgcatgataattattgggaaatagaagattatacgatattgtcaacttcctaattctcgatagcgcggatttgaaatccgtgctgtacttccaagctcaaaaatgctttggttatatcccatttcttcataaaatcctatacaaattcttctctttctatggaagatttcctgatttccggaacagtaactttatgggacgtaaatcattttttcgcattcgtataaaacgaataataataaaaaacaggatacttttcaaaagtttctgatttacccatggtgtacgcatcatgttcatatatatttgaaaaatcaaggataagagatttcttttccgggaaattgaagatgaactttattaaactgcttacagcagtttccgtctcataggtaaataaaagttgttttccgtcagggctgtatactttcttattatagactctcgcattcagttttttatccacacccgtatcactggattttaccttgtacatcaatgtttccttactattcttcataatgtatacatctgcatttttgtaactttcatcatacttaaaaacaacggcatcattaattttcatgatcatatctgtgaatttttcttcattagggatcgactgggtttccgtgcctgcaggcatttcgataggtcctgattttgaagttgctgccggtttctttttttgtgcatttatagtaaccccgaagaataccattactgttacaactgaaataaatttgaaaattttcatggaatattttttttgcaatgttatgtaaaaatttagaataaatgcacaccggattgataataattaaaggttatggttttccgtagtcttatctaatgtagttgtataaatttgcacataaaaatgtgttaataattaatatattagataaatttttaacttactatggccatcgacttcaacaaattaattaccattgataaaaattgggtggataaggaacttaaacatcattatactgaaaaaataaatgataaactaaatgtaagattatattccatcaaagcttcagggactacaataaattcgatatcattagcaaatactttgcttgacatacttccatattattttaaatctaaaatcgaaattgataaagctattaatagagaagtatctaaaaccattggcaaatatacaacagcatctgatattgatcatcaaatagaaataagtaaaatagttcataccagaacatatagagaggcaaaaagctttttcaaaaaaaagagtgccgattctaaaagtggtaaatatggagaattacttttatttggacttgtggaatcaattttagattgcaaaatgattgctcataaaataactaaccttacaaattatcacgatgaaattaaaggtggtgatggggtttttatggggaattataaattaccaaacggcaatattgaaaccgcatatcttattggagaatcaaaagtttggcaagattattcaggagcaaaaaaagatgctttagaatctataaataggttttatgattcaaaggttcaagctgattttaaagcattggaatttttcattgctcaaaaagatattgaaaaagtagttgatgagcaaactgatatcgatgaattatatgagagacttgatcaaaaatctgatttatttaaaagccaaatagctgttcatccaatattaataatgtatgaaactaaaagctataataatctaatgaaaaaagctttgaataatactgaattaaatagttcaattgacgcacaaattcaatcgaaattaaaattcactcttgatagtattgcaaaaaaggttagagaatttccagaacttgaaaaagtttttttagattttattttaattcctaccaatagtgtttctgagtttaatgatacaatggacaatttaatatgagtgataatagttctttaattcttcaagcttttgaacataaaactttgaataaggtaatttttgattataccttaaaattactatctagtacatttgactctataaaatcagtagaaatcaacgatgatgaattaaaaaaaacaatttggttagcatctatcttagcgaatagtgataatgatattcacaagagaaaagctcaattatatgcttcactgctttttttaaacaatcaagataacattgaaattctaaaagtttgttatgttttattctcaagactaggaaatttgactgctacaaaatttttaaaaaatctctactctaatcaagttgataatcctgttgaattaaaagcagaatatgattttggtgattttttgagctatgaattattatttgaaagagaaaagaaaattatttctttagagaataattcatttttagttacagactttcaaaaacatttgtgggaaggacttaacaatatttcggagatagctatctcagctccaacttcctctggtaaatcattcattattaagcagtatctaattaatgagttttttaataaaaatgaatttaaagctttatatattgttccttcaagagcattaataaatcaggttagtgaggaatttaaatcagaattaaaaaatgatgttcgcttaaaaacttcggtaactgaagaaaacgaagtttctgataaagaaatttatatcttaactccagaaaggtgtataaaaatattagacattgatattaagattgattttatctttattgatgaagtacaaggtatagaagatactctaggaagaggtctaacttttgaatatgtttttaacgaaatttctttaaaatttccctctgcaaaattcatttctgcaggaccaaatattactaatcctaataaaacatttaccgaaatttttgaaagagattgttcaactatccaaacaaaactttctcctgtatttcaattaaagattacattacaaaataatcaagggagtaaattcgatgttgttatacaaactgagcgtggcacatatcaaaaatttacacaagattttaaatataattttaaaaataaaaacaaaggagagatagttgctcaattagtaaaatatatagctctaaaagattctaatatagtttttgtacatgacggatatcatgcgcaacaatgggcagttatttattcaaatataattgaggaagagttcgaattggatgaagaagtaaaagaactcatagattttcttacagaagacattcataaaaaatattacttaatcgaatgcctaaagaaaaaagtagcataccaccatagtactttacctgatattgttcgaaaagagattgaagaattgtatgtgaatgagaaattatccacaatctattgtacatcaacattattagaaggtattaatttacctgcaaacaatttatttacctttcaacctaagaaaaaaaatataccattgacaaaattcgaatttggtaacttaattggaagggctggtagaataaagtcttcactttatgggagtatttattatattcaaaatgacaatgataatcaattagcaagtaactattacgatacagaatatgataaagagcttgaagttttttcttcgaattcaataaattctttagatgttgatgatttgaaaattccaactaatcagattgataaaggacaggacatagaaaccaacaaggctcaacaaatatccatttttttaaaacataagtatctaaagggagaagattatgctttaaaatacctaaaaaataaaaaattcactgatgatgaaattagtactgctatgggatatttaaaaagtaatttaaatacaattgaaatcccgcaaaatgttctaatgaaaaacccatctattgacccaattttgcaaaatcaattatatattagaataaaagcagatgacataagagaatgggttctgaataagaccagcaattttgctaagtttttagactctgaaaaaattaaaactttaccaatctatgatagaccattttactggcaattagttaatttatttgaaaaattaaatgaaatatttaatttgttttatgaaggttataaaaaacataatcaaaaatggctaactgccacttcaactagtttacaagcaaaaagatggcttagtggggcaccaataggacaaattattaaacaaaatattgaatatttgtcagggctaaataattcttataagataaatccagaaaatttagaagatgtaaatcgagtaataaatgatactattagatataattccaacatcacaacatatttattgcctaaatatataaaattacttgtagatattcttgatgaaattttaaccgatgagcagaaagaagaatataaactcacgatgagtttgccaactatgctagaattgggaacacaggaaccattaataattcaattaatttcttcaggaattacaagaagtgtagcaatacaaatttttgatatctatattaaaaatactacaaaggattttagagaaaaaaatgatattttaaaatgggtatcaaaccaaactcatatagcaggattaaaacctatatacaatagatatttaaaaaggattaaggttttaaaataattaatcttgaaacccctcacctccgcttcacaaagtctgaaaactttacgaagcgagttgtttaaattaattgataatgaaatcattcaacataaaagaaataatcggaaataaaggtaaaatagtatttgatgatctaagtacaatagatacctcgctgggcattgaaaataatattgacgatttaaaagaagatttgctgcaagttgaattggcaaatggcaatgtattagatgttggatggtattcttcatctgatatagaaggacattttagcgtttgtataataaaaaattatgactggatggaaccattctatctaaaaaaatgtaatcaatggaatgacttaaatgaattaataaaagaagcaataagttttaacttggaaaacagctaaaaaacaggctgaaagatttcaatgaacaagaggaaacagtaccctgctttgcaaagtctcccaactttgtgcaataataatttaaaactcaaaaacagattttacaagctctccttttaaaccaacccctcgcctcaccgcgaggatttcctattccaaaatttaacataatatcctgactgtaaaatatttacccaaaaataatgaccatttcaaaataaattttaaatttgaaagaatttaaaaaaacacaaacatttatgtcttcaagatcagaaatagggcacgccaaaaatgtggcgaacctgcaaaaattaattcagcagatttccgtttatcccctttacaatccgccggttcccgggcttaccatcgatagtctccagaacctgtacaccactgccaatgcgaaacttacggaagtcgaggaaaaacgcaatgccaacaaaaatgccatcgctttgcgtcaggatgcattcaaaaacctgaaaacaaactgtacccgaatcaccaaccgtttagaaattctcgggttatcacagggaaccttaaatcaggcaaaatcattgaaccgcaccatacagggggcaaaaaagaaaccagccacaacacccgaggaaggcaaagaagcacccaaaatcatttcctcttcccgacagtcttacacccagcaagctgaaaacttcggcattcttgtacagttgctcgaaaccataccctcctacacaccggaggaagaagaactgaaactatcaaatctcaatacctacaaacaatcattggtaaccaccactcagtcagtagaccagaccgaagcagaacttaacctcaagttcatcgaaagaaacagaatactgtatgcagaaggaaccggactttacgccattgtccagaacgtaaaaaaatatgtaaaaagcctttacggagccacctctcccgaatacagcaatgtagcggcaattaaattttcgatgataacggaataacatccttctacagaacaaagaattaaaaccaaaaatcttttcctaaaagttaacaactaaaatcaaaacatcctgacgaatattcagtcaggatattttttacatttaattgcccgtttattaacctaaagcttcgacaggctcagcttaacatcgctaaaaatcaagcgtttagtattagaggtgtcacactgagcttgtcgaagtgcctgttataaataattgattttaatatcagtgcatagtaataggtgtttaacggatattcaatttttatattttaatcgctaaaaattatgttcgatcaactggaatttatattcttctaactgtaaacaacattcctgctcctaaaagttatattcgatcaactgaaaattaaattctttcaactctaaacaatattcttgctcctgaaagttatattcgatcaactgtaaacaatattcttactcctgaaagttatattcgatcaactgaaagttatattcttccaactgtaaacaatattctttattacttcaatttaaactttaaagtcaaatatataattcttccttaaactgctccgtaggagcaatatctgtgtagaaaaatccatccatacagcaacagaactccggaggagttcaatatcgcccctcagatatcatcacaacgccatctgaaacctcattttccctatctccaccgacaaaccccataaaaaaaccaccggaaatccggtggttttcatatctgttaatatcagaataatcttaagcttcagatgaaggattattatctcccgcaggtttttcaccttccggtcttctctgtccttccggtctgtttggtctttcagatctgttgttctgtccttccggtcttggtcctctttgttcaccttctttcttctcaggtcttggaggtcttggcagcaaaacttttctggaaagcttcattttcttacggtcatcataacccataaatttcacttccacttcatcaccttcgttataaggaactttgtctaaacgagcccattcgatctcagaaatatgaagaagaccttcagtacctttagcaatcgctacgaaagcaccgaaatccattaccttcacaaccttacctttgtaaacttcccctactacaggaacaaaagtaatctcattgatcttcgcaatcgcttcgttgattttttctctgctgacaccggaaatttcgattcttccgatttctccaatttcttcaattgcaataacagtatctgtatccttctgcatttgctgaatgatttttccaccaggtccgattacagcaccgatgaaatctttaggaatttccatcattaccattttcggagcgtgaggtttcacatcttctcttggagcagcaattgtttcagtaattttatttaagatatggattcttccgtctttagcctgtaaaagcgctttctccataatatccattgataatccctggattttgatatccatctgacaagctgtgattccgtctgcagttcctgttaccttaaagtccatatcacctaaatgatcttcgtctcctaagatatcagaaagtaccgtgaatttccctgattttacatcagttaccaaccccattgcaataccagaaactggttttgtaatctgaatacccgcatccatcaatgccaatgttccggcacaaactgtcgccattgaagaagaaccgttggattctaaaatatcagaaacgatacggatcgtataaggattttcttcaggaatcatatttgccaaagctctctgagcaaggtttccgtgaccaacctctcttcttgaagttcctctcaaaggtctagcttcacccgttgagaacggcgggaaattataatgtaagaagaatctttcgtcatagtttgccattacgctgtctaccatgttcgcatcttttaccgaacctaaagttacagccgttaaagattgcgtttcacctcttgtgaaaattgcagaaccgtgcgctcccggtaaataatcgatttcgctccagatcggacgaatcgtttcaggatcacgaccatcaagacggattttatcattcaaaatcatctgacgcatcgcttctttttccacatcgtggtaatatacttttacgaaaggagttactctttcaagctcttctgcatcttctgcatactgagcaaggaattcttcacggatcgccttgaatttttctcctctttcttctttgcctgaaggagttttcgctacttcatatactttatcgtaagtttctttccaaactttttcacggatttcctcgtcatgagtttcgtgagaatattctcttttcgggaatgattttcctactttttcagctaatctttcctgagcttcaacttgttttttaatttcagcgtgagcgaaagtgattgcttccagcatttcctgctcagagatttctttcatttcaccttccaccattacgatagaatctttagtagctcccaccataatatcaagatcagaattcttaagatcttcgaatttaggattaatagaaagctcaccgtcaattcttaccactcgtacttcagacatcggtccgttgaatggaatatctgtaatggcaatcgctgcagacgccgccaaacctgctaaatcatcaggaatcgactgtccgtcataagaaattaatgaaatcattacctgaacttccgcatggaaatcttcagggaacaaaggtctcaaaactctgtctaccaaacgcatcgtaaggatttcctgatcagatggtcttgcttctcttctgaaaaagtttccggggattttaccgcctgcatagaatttttctctgtaatctactgttaaaggtaaaaaatctacaccgggattggcttctttgttggctacaacagttgctaaaagcattgttccgcccatttttacgactacagatccgtcagcttgcttagctaatttccctgtttcaattgtgatttctctgccgtctgcaagagtaatcagctctgtaattgcttgaggtacactcataaattgttttgtgttgtactccgtattgagtactttaattaattatatttcgtctaaattttcgtttgcaaagataatgtattataatgatttttttaaatttttgtctgtaaaatcttacctgtctatcccataatttccatatattctgcaccgaaaaccacttctgattacgaaaacaaaaaagcaacctcttccgagattgctttttatgtgaaaatctttgtagattattttcttaaacctaattcagcaataattgctctgtatcttgcgatatccttatttttaaggtaatctaataaactttttcttttacctaccagtttcaccaaagatctttctgtgttgtaatctttgtgattgctctttaaatgagcagaaaggtggttgattctgaaagtgaaaagtgcaatttgcccttcagcagttcctgtgtcctgtgcagattttccgtgttttgcgaaaatttcctgctttttttctgttgttaagtacattccaatattgtttaatgattattatgtaacgggtgcaaaagtacgactatttttttattctgccaacattattgatttcatttattgattttgatagaaaaaaatgttaaaaatttcttaaaaaaattatgctaccccactaaaaggcagtaattttgcatacgaatttagtgatgagaaaattaataacatttaccacctttactttagctctttttgcaggtttttctttattaaaagctcagaaaagccatgaaaacaagatcaaaaaagttttatatttcaatcctgaggtagaacccgaccttcaggaaattaaagaacctaccaatacagctttcttcagcgcagtttctgataatttaagcgaaagaaaaaacaaaatgctgagaacggaaacccagatttcttttgacagcatagacaagcagaccgtttgggattactgtaaaaacaacgatgccgattttgccattgttccgaaagtaaaatatttcaaagtaggaatcggaaaatatgttttttccaatcaggtcgtggtaagcatgaaactatttgatgcagaaggcaatctggttaccgaaacggattatgatacgtataaaaagaacatgagattgcttggttccactgtaaattctgtaaaaataggaaccaacggagccatcaaaggaattttaaaacagctaaaaaaaattaaaccttctgcagaatctggattttaatttccggcagttaaaactattatgcaagtcattgaatcttataaaattaaattcatctctgtgtgaataattaaaaatattttattaatttagtctgaaacaattcattcaaactatctcaattgaaatttcttagcatttgcagcttttgcaggtgctttttttattgaattgtttttatttaaatatattcatcagtaatccaacatattaaaatcatataattttcaattataggtgaataattaaaaccttttttgtatttttagcatacattaaatctaaataatatgaaaaattcaaacctgaaaaagctcaccagaaaagagcaggaaaagatcaacggcggaggtcttcagaaatgtcattaccattttgaatgtccgggtggatcctgctgtcaaaatgtttgtgtctactacaactgtccggaagtttaaccccaaaagattattatgaaaaatctaaagaaactaacaagaaaagagcaggagaaaatcaatggagccgctttggtacagtgtacgaaagactcccactgcttcggcggatattgctgcaattatgcgtgttatatgtatgcctgcattgaaccttagtatatgagaatgtatactgaataataaaattcagcagagaagaaaaaaaacaataatctattacttttaaaatttaattttttcgaagcatccgcttttttgcagatgcttttttattttcggaaatttaaataatccttaaattttgcagttctttgggcaattttaaaaatttgggctatttttgcactactcttaaaaatttgacgttttgaattctaaagacgaacttatcttcaatccagccgatattgccgaaactcttagcgaacttcacgcggacgagaggcttttggcattcctgaaagttccgaaagaatacaaagcagatgttttttcgcatcttgatcccgattttcaggaagaaacgatcagaagtatcgggagcgatgaagtttcagaaatcctgaatgcgatgacgccggatgacagaacggctctttttgaggattttccggatgagcttattaagtattccatcaatcatcttaatccacaggaacgcagaatagcccttaaattattaggctacgattctgattctattgcccgtcttatgacgccttattacatccagatccgtaaagaatggacgattaaaagatgtcttcagcagattaaaaaagtcggaagtaaagtagagacgatgaattatctctacgttgtggacgaaagaaaccgactgatcgatgatattgctctgggaagtcttttgttagcagaagaagaaactttggtttcagaaattacggataatcattttgttgcgattaccacaacgacgactaaagaggatgcggtacagtatttcgaaaagtatgaccgtgctgcgcttcctattattaccgaagcgggagttctggtaggaattgtaacgattgatgacattctcgaccagatcgagcaacagaatacggaagatattcagaaattcgggggattggaagctttggacgttccttatacgcagacttctcttatcgaaatggtaaaaaagagaggaatgtggctgattattttatttttctctgaaatgcttacggcttcggcgatgggttattttgaggatgaaattcagaaagcggttgttctcgcactttttgttcctttgattatttccagtggaggaaattccggttcacaggctgcaactctgattatcagagcgatggcacttcaggaaattactttaaaagactggtggtatgtgatgagaaaagaaattttcacaggtttatcactgggcggaattttagggatcatcggtttcctgagaattatgatctggcataaagcaggttttttcgactatggaattcactgggcttttgttggattaagtgtaggcgtttctctggtgatgatcgtactttggggaacactttcgggctctatggttcctttcattcttaaaaaattaaaactcgatccggcaacttcttccgctccttttgtggcaacgttggtggatgtaacaggattaatcatttatttttcggtcgcaggacttttcttaacgggcaaacttttgtaattttaggcgacatctaaaatagtactatgaaggcagtttctttggttccctcgattacggaggctttatttgatttgggtttaacggaaaaagaagtggtcggaagaacaaaattctgtattcatcccgctgaaaaggtaaaaaatgtaacggttatcggcggtacaaaaaatatcaatattgaaaaaataaaggctttacagcctgatcttattttagccaataaggaagaaaacgtaaaagaacaggtggaagctttaatgcaggacttcaaggtaatcgtcaccaatgttgaaaatattgaggacaattattatatgcttaaaaatttaggtaaaatctttcatcaggaagaaaaagctcagctttttaatcttaaaatctatgatgttctcaaccacgcaaaaattgaatctcccataaaagttgcctacttaatttggaataatccttatatgacgataggttccgatacttttattcataaaattctgggtgagatcggttttgaaaatatttttaaagatcggaaacgttatcctgtgattcagacggaagatcttgcggaagcagaactcataatgctttcttctgaaccattcccttttaaagagaaacatattaaagaattaaagaagttttatcctgataaaaaaataatgattgtagacggagaggcgttttcatggtacggaacgcacattgcgaagtgcgaaaattattttaaggaacttatttctgatcttaaacacgaattttactaattttttcacgaatggcactcactctttttttatagattttctaagttttggctaaagccaatttattcatttgtttatgaaaacggactaaagtccgtttctattgatcccatttcaaaagaaaattttgatctgtcctatcatacaaaagactccggctcttcgagccggagtcttatatttaaacactttaaaagcgagagtttttacaaaattttagaaacttcgttacacagccattccaataattccctgtcttcttctgtaaaaggatcaatcgtatgagaatcgatatcaatctgaccgatattctgtccgtctttgaagattggaaccacgatttctgctttggtatcgatagaacagcttaaataattactttcttcatgtacatcgggaacaacaaacgtttcattggaaacggcaacctgaccgcagattcctttaccgtaaggaatgatggtgtgatccgtcggagctccaacgtaaggtcccagtttcaactcatctttatctccgtttttgaaataaaaacccgtccagttgaaataggatatttcctgatccaaaaggtgacacactttctgaagtttctcttctgtattatgtttcggactttcaagaatagacgaaagtcgtttttttaattctgacatttttttactgttttaagaaaattgttttaaggaaagttcttctttgtagccgaacattccacgctcttttatcatctctgccactccttccggaagctgattttcccatcctttcatattgcatccgattttcttcaggatatctctggaataaatttccaaaaattccggattataattggtaatatctacaatacggttgttatgcttgaaatatttgtaaagttccttaaggttttcttccactttaaggttatcggaatccagtaattcgtgagtttccggatctttatatggatacagatacactctcatcccgtttctgaaaaatttcccgaaagcttccagaattcctcctgataaatttttataatatttttcgtcgaataccatcaaaagattattcacgcccattgcaacgccgatttctccgcttgtataggaagcaaaataatcgatcagtcggtaatattcagaataattagatacgattacggtatatcctaatttgccgagaacatctactctgtcgagaaaatctctttcattgatgtctccgtcggcgcgaaggtttgaaatggtaatttctattaaaacttcggtttcatcctcagtacaggttacttctttcatgaacatattgagtccgttctgaagcatatcgatgttcaccttcgttacaggtctgaagcttcctcttaccgcaaaaatgtttttcttatacaaaatatctgcaggaagcatattattcccttccgaattgaaaatcacggcatccgtcattccgtttttaaccaactgtaaagacatcaatctgttatccacatacgcaaaagcaggtccgctgaaatcgatcatatcaatttcaagattgtcttttgcaacgtcgtcgtataaagattctattaaatttcgtggattgtcgtagtaatgaaaggctccgaaaataagatttacccccagatttccaagggtttcctgctgcaacgtggcatcattttccttgaattttacgtgaataacgatttcattgtaatcttcgttctcctttacctgaaaacggattcctacccaaccgtgacctttcactgttttatcgaaattaatcgtggtaacagtattggcgtaagaaaaatattttctgttggggttactctctctggaaattctttcttcgataagggctacttcataacgaagcatttttcgaagtctgttttgggtaacgtatctattttttacctcttttccgtagatggcatcactaaaatctttgtcgtaagccgacatcgccttagcaattgtaccggaagctccccctgctctaaaaaagtgtcggactgtctcctgccctgctccaatttctgcgaaagtaccataaatagtaggatctagattaattgttaatgctttttgtttaggagttagtttctgatacattaggacattaaatttttcgtaaatttaccaaaattaaaccaacctcaaaagaaaatgaagttgaaatttttaggaacgggaacttcgcagggtgttcctgtgattggctgcagttgtgaagtgtgtacttcaggtaatcccaaagacagtcgtcttcggtcttctgtgatgataactaccgatgaagaccaaaaaatccttatcgactgcggacccgatttcagacagcaaatgcttacacaaaaggaagatcgtgtagatattgctctgcttactcatgaacataatgaccatgttatcggtcttgatgatatgcgtcctcttattttcaaaaccggaaaagatattcctttgtactgttcttcaagagttgccgacgaagttaaaaaccgttttccttatgcgtttgcggacgaaaaatatcccggagctccggcttttgaacttcatgaaattgaaaataaaccattcagagttgtagatacagaaattaccccgattgaagtcattcattttaaaattcccgttttcggttataaatttaaaaaactggcttatataacggatgccggatttatttctgaaacggaaaaagaaaaattaaaaaatctcgatgtcttgattttaaactgcatccggaagtctgatcctcatcctgctcattttattttacctgatgttattaagttatttgaagaactgaaacccgaaaaattatttttaacccacatcagtcatcatctgggattgcatgacgttgaagataaactacttccatccggaatgcaccttgcctacgatggtttggagattattttttaaaatttttctttaaaaaactttggagaataaagaaaagtttctatatttgcacaccgattcgaaacaaggtaacacacttgcccaggtggcggaattggtagacgcgctggtctcaaacaccagttcttaggagtaccggttcgatcccggtcctgggtacaaaaatcccctgaaatcatttgattttcaggggattttgatttttagggtggctaaatttttattatatattttattgtcaatatggaaattttagttatttttatgtaatgccattttcatcagaaaaattatggaaactaaattaataaattttatagatttatttgctggggcatctggtatgtctgaaggatttgtgaatgctggatttaatcctatagctcatattgaaatgaatcaggaagcttgtttaacaataaaaacaagagcagcatatcattatcttaaatccaaaaaaaaattagatatatataatacttatattaaaggagaaatttcaagagaagaattttataaaaatattcctaatgaaattttggattcagtccttaatgttgagatagacgataattctattaaagatattttcaagaaactaaataatgaaaagctaaatattgatttaataattggtggtccaccctgccaagcatactcattattaggaagacatcaagaaaacattgaaaatgatcccagaaataaactatatatccaatatggtagatttttgaaagaatttagcccaaaggtatttgtttttgaaaatgttcctggtctactaagtgccaataaaggaaagcattttaaaaatctaaaagcttatttcagaaaaatcggttatgaagtataccatgaaacacttgatgcttcagattatggtgttgttcaggcaagaaaaagaataataattatcggatggaaaaaagaaaatgattttggctttcctgattttgaaaaatcgaaaagaaaatatactgttaatgatgcttttcaagatttacctaaattaaaacctggtgaaagtcatcagtatataaaatataaagaggagaagaataattatcttgaaaaattcaatttaagaaatggaattgaatttgtcactcagcatatttcacgccctcataatgagagagatttagcaatttataaaactgcgataaataagtggaataatgaacaaataagaataaaatacccagatttacccgaagaattaaagacacataaaaatgaatcttcattcattgatagattcaaggttgtaaacggaacaggagtatcacatactgtagttgcacacattgcaaaagatggacatcattatatacacccagacgaagaacaatgtcgatctatttcggtaagagaagctgcaagattacaatcttttccagatgacttttattttgaaggctctcgttcagcagcttttaaacagataggtaatgcagtacctccattattggcttatgcaatcgcaaaaaaaataaaagagctattatgaacgatgaaaaaataagagatggattgtataaaataagaccagccggtagacacattattacaatcggcagagatcttataaaagataaatatgctgcaattgtagaattagttaaaaattcttacgatgcagattctcctatatgtagagtttctttattaccttttgaaaaaaaaattatagaaaaagataaagaaataattataaaaggaattaaggtcatagtaaaagatgaaggacacggaatgtcttttgatactgttacagataaatggatggttccttctacagatgacaaattacatagaaaaaccagtcctaagaatagaataatgcagggaaaaaaaggtattggaagatattctgcatccattatcggagatgatttggttttacagacaatagatgattcaggagatttaactactttatatttgatttggaaacactttgaagatgctaaatatctgaatgatgttgatgttttaattgaaaattttaaaactgctaagactagtggaacagaaataataattgtaggtgatgaatatcatttaaatgattgggatgttaaacaattaaaaaatttaaaatcagaattaaaaaaacttattcctcctacagaaaaagatgtaaaaaaagaaacggatgataagtttgaaataattcttgaattaggagatttcccttatgaaggatataataatgttgtagaaacaattgaaccatatcctttatttgaattatttgattatagaatatcaggaaatgtttctaaaaatggcatcgccaagttgaaatttgaaaataacagagttaagggttcaccgattgaagatctaaaagaatttaaaatcttattgaatcaagaatctgaagaagataaacaagatttttgtggtgatttaaaagtagatttccgagtttttgatagagatcccgcttcaattgatggattaatagaaagaggattaaaagacccattgacaggcgaatatgtaggaagaagagaggctcgtattatcttagatacttttaatggtgttggggtgtaccgcaatggatttagaataagacctttaggtgatgcaggatttgactggctatatttagataatgaaagagttcaaaatccttcattacgtgtaggtagtgatcaggtaataggatttattcatatacagtccgaagatttatcaggattagtagaaaaatcagcaagagatggactaaaagaaaatgcagagtattttggtctacgagaaatagcaaagcaagtattaaaagaactagaaaacagaagatttgcatatagacaaaatgtaggcttaggaagaagcaacagagacataaatgaaaaaataaagactctctataattttaaagaccttcaggaaaagattgataaagaactggatgttttaggaattgaaaaaacgaagagagaaggaattaataagctaatttctgataaagaggaaaaaagtaacaagattgcaaatgaattaaagcaagttatcgctttatatcaaggacaagctaccgttggaaaaattgtgaacgttgttcttcatgaaggaagaaagccgcttggatattttaaaaatcaaatacctctaatttatgattggtcaaaagaattagaaaacgatttcagtcaagaattgctaaacaagataatcaataggttatccattgtagaagaacaaggacaaatttttataaatctttttggaaaattagatccattagctgcaaaaaaaagagatcgtaaaaaagattttaatttatttgaagttataaatagtgtattagatgtatttctaccgtttctaaaagacatagatataaaaattgattgtaaaattgatcaaactgtctatggttggaaagaagatttttatattgttttaacaaatctcgttgataatagtatatattggcttcaatcaaatactgataagccaaaacaaatagaatttaaagtatatgaagaagatgaatctcttataattgaatatagagattctggaccaggaatagaaaagcatttgattgaaaatgagattattttcgaacccgaatttagtaataaaacaggaggtggaaccggacttggtctagctatcgcaggagaagctattgacaggaatgatggcgatttaaaagctatatattcagaaaatggtgcttttttcaaaatagaagtaaaaatacaataacctatgaaaatattaatagtagaagatgatataaatcaaattcaactttatgaggatgtaattgattcatataacaaaaaaaatgacatacaaattacaactttatctgtagataatttagaagatgctaaacaagcattattaagctctgattatgatgcagcaattgtagatttaaaattatcttctaattccgtagaattagaaggtatggaaattgtaaatgaaattattgataatttacgatttcctctttttattgtttcgggtagtatagctcaaattgataaagaagaaaattttctttttaaaaaacgatcgagagatggaaactttcaagatgtactttctgaattaaaagaaatttacgatacaggcattatacaaattttaggtaaaaaaggtaaaatagacgaatatttaaacaaaatattctgggagcatttatcatcatcaatggacatttggattaatgataattcaagaacctctgaccaaaagcaaaaagtattattaagatatattttattacatatacaagaatatttagaattaactactgaatcaaattttgaaaattatcatcctgcggaaatatatattacccctcctattaaagatatattatttaccggcgacatattaattgaaaaagaatctcagaaaagatatattattctaacaccatcttgtgatttggctcataaagataaaaccgaaaatattttattagttgaagttgaaaataaagaaaaaggacagatatctgaattaaaactaataattaataatcctgaaacaggaaaggacaaaaaaaataatgctaccgggaaacttaagaatttaattaagaataatatacctaaataccattttttacctgaatacaagagtattcctgctgggctaatcgattttcagttattaaagtcagtaaaaaaagacgatatagctaattactttatcagaactacctcagtaaataataattttacaaaagatattgtcgctagattttcattttattattcaagacaaggttcgcccgattttaattttgatgaaatatatgattcattaataaattgacatggatattcatactcccgagcaacgctcaaaaaatatgcgagcaatcaaagcaaccggtacgaaagatgaagttcgtctggcaaaagctttatggagtttagggtttcgatatcgaaagaataataaaaaagtattcggaaaacctgatcttactttcaagaaatacaagttagcaattttcgttgacagtgaattttttcatggcaaagactgggagactgaaaagcacagaattaaatctaatacagagttttggcataagaaaattgaacggaatattcagagagataaggaagtaaatagttatcttatccaaaatgggtggacagttttgagattttggagcaaagatgtaaagaaaaatttggatgaatgcataaaaaaaatagtttcaattattgattctaataaatagagctttatactaatttctctttattaagaaaatagcttccagaaacctaaacaacaaaagagcctgtcccaatctcaggacaaactctttttattaaaatctaaaaaaacttttcttatattaaagttaggttcgggtaaattcaaaaaccgatgagtgttattattgtactaaaacatcattattttcagactccttcataatatcacgatcttcgtgttctgaaaattcttcaaacaattcgtagcgaggttttgatagtgaacttaaaaaagtaatggttgtaggatttcccttttcatttacttttacaacaatagatgtacagcagggtgaagcattgaaataattttcaaaccttctgccgcatttaaagcattctgtaacaatgattttctgtgtttcgaaattttccatggtaaatgtgtgtttttttgtggaacagcccgttaaagagctaaatatattttttcatcaaataattgtgttttcagaatttaaacttatgtctcagtctctacctgtatcttattaaacaaagaaactttgtacagtgcatcaataacggcttcgtcttgtaacttcctgttcttaacttttcttatgtaatcgggatctttagattttttcagtaaaatatttacagaacctgtgtagcgctttggaagccatcgattaataaaatcaaatgtttcattaatactgttctgatagggatatatcaatttgctcatacaaataaatattttgtttaaccttttttcgtaattttgtgtttctctctttgggagaattatgaaacaaatatacaaatatatatttaaaaacaataattaattgaaattttaacaattatttattaattaaaattaaaaagaagaaattattcgatatgaaaattcacgagaagttacgcgagtacagtaaatcaaaaggagaaactttgagagaactcgcagacgaatacggcatgactccacaggcgatccagctttattttgcaggaaaaaatgcaatcccactcaattttctggtttggtacttagaaaaacatccggatctggatctgtatgcactttttgataagaacagagaaagtattgtttctgagccgaaagcaccttataataaaaaaactaaaaaacaggaagttatagatcgtattgtggagattttgcaaaaagaaatgtaatattctctaaagattaatcatcaaaatacatcaaccggaaaaattaacataaaatagtctttccggtttttatttttctgtaactgaggaaattgatgaccgacagttcttttggcaattaaaacaaaattagtttttcactttttaacaatttatttatcttcgcacctcgaaatttaaaaaacttagttgctcaaaaaatcacaaatatgacgaatgcttctcataaactgattcctatgacagattttgtcatcgagtattattcccatgaaggatatgcagaccttcagacgcttaaactaatgaacaattatgccaatcttttgaaaaaggagcttactttgggaatgtttgttcccgtagattcttcaggtgaaatcctgaaagaacccaagaactacgaatcctggaaatctctcgagcacaattccagaaagagaaacgacgaagaaagcaaggccttcgaagaatataaaatctatcagaaagccgaaaaaaaatgccttttcgaaggatttaaaattgcttacaacggatattctgtggtgagaatcgttgcttcttacaatacttcaatcgaactttcgttcaataaaaacgaaaagacattccaaaacctcaaagacattgaatctcttacttcttttgatgaaatttatctgaacaatgctgcattgaagaaaattggtatacaaaaataaccctcaattagcttccggttctactctttcaccgcttttccgtacacatccaaagctctttttctcgcaaaagtatgctccacaattggttctgcgttcatatctttttcggaaagccatgttttgatgtattttaaatctttatcgaattttttagtctgttcagaaggattgaaaaccctgaaataaggcgccgcatcgcagccgcatcctgcagcccattgccagtttccgttgttggacgacaactcatagtccagaagtttttctgcaaaataggcttcaccccatctccagtcgattaaaagatgtttggtaaggaaactcgcgacaaccattcttaccctgttgtgcataaatcccgtttcgtttagctgcctcattcccgcatctacaataggatagccggtttttccttcgcaccattttttaaattccttttcatcatttctccacttaatgccatcgtatttttctttaaaagactggttcaccactttcgggaaatgatataaaatctgcataaaaaactctctccagatcagttcattcagccagacttcattatgcttctgtgcaaattccacgcattttcttacggagatagttccgaaacgaagggcaattcctaaacgggttgtatgatccattgccggaaaatctctgtattgatcgtaatcatcgataatcgtctttttaagtgacggttttttaaactcaaaatctgttttctcaaagcctaaatctttaagcgttaaaaatttggaaggcgaatatggatgaaactttgaaaaatcaacctccatttttttgaaagtggcagatttgaaattttctttccattttcttgaatacggggtataaacagtgtaaggttttccgtcattttttaccacatcatccttttcgaaaatcacctgatctttgaaatcctgaaatttaatatcactttttttaagcagatcctgtatttcttcgtctctttttattgcctgtggttcataatctctgttgcagaacacagtatcgatttcaaaatctttaattaattttttgaaagcttcaacaggcttatcgtgaaaaaccgttaatccgcttttatgttttttaagctcagtatgaatttcttccagagcctgataaaaataatctactcttctgtccgatttatcttcaagcttatcaagaatttccttatcaaaaataaaaaccggaactacttttaaaccggctttaagtgcatgaaacaatcctgtattatcttccagtctgatatctcttctgaaccaaaaaatatttactttttcttttttagacataatgatttgttaaccctgttttcactacaaaaatcagactaatttttctaattgtaaagagattgtatttaaaaattttcattgacttattcctttaatcaatattgaataacaacaattagaaggcggtgttttagttgtgtactctgggtgacacctcgaatactaaccgcaatatttttacattgtcaggctgagcctgtcgaagcctttattagttaaagggataagtcaaattttttaataataaatccacatcagaacaggctttttagacttctgaagcatcggatctatctctttcatcgcattattggatatggtaggacaaccccaaccttcgggcgaacctttcgggaagacttctttatcgctcatcagattccaggaatgaaaaacaatgaatcgttgcagcgcattgctgttggttttttccagaccgtgcatgagatattttacatgaattccccagtcgctgtatcctcgtccctgaattttgtatttgccaagtgatgaaagatggcttccgtcttcattgctgaatttcggatggtctttagattcgtcactactccactgattatttccgcaaccgtgaccaaccagatattttttcgaagcagaattggttttaaaatcccaaaccaccagtcttttcactccggaatgcagactcatatcaatcagaatgcaaaaatctgtattaaactgactggacttacagaatatcaaagcttcttcagctttagattttgttttaattaaatcaatttcgggctttttctcttctttcgaaacaactgattctctaggttcggtgatcgttttcgcttcctgtttgcatgataacaggaacagaaatgccgttatccaacttaaaaaattcacagaaaactatttgtaatgtaagaaaattccgtaatctgaaggcgtccagaatgccgctttctgatccgcaactttcagtgcattatttgcccatgtattgcaggtattcaggaagctgtattttccctgcgcatcgtagaatgcgtcattacttccgtaaacggcatttgtaggaacaagattgtagttcccattttggtctttatcaaatttagcatctacaaaatctaccagttttttatactgatcgcggctgatcataatttttttacagtcgtccccttctttcattgttttgtaaaaagtacagtgcattgccgattcactaagccagaaagctgctttaaaagccgtcgaaaacttaagatctgcccaagtcggagtgtcgagatagaatcctttatctccccatcctattcctacataattgtaatctgtacttttggatttcgtattgctgaacgggatttttgtgctccaatcctgtacatcattttttacaggcattacaatatccgtatgaacgccgttggtataaatataaacaggaatttctttcttctgtccgtcatccttcgctgaaacttcaataaatggtaaaaagtaacctaaggcgacatacagaacaacaattcctacaataattcctatggcttttataatgagaagtaacatctttttcacgttcatggttttttaaagttaataaaatttaattaataatttttcgcaaaagtatttgtttcaatcggaattttcgctaaatttaagtaccaaatattcaaaaatatgcacaaaaacatgaaatccaacaaaagatttaaagtaagagtaaaagtagccccaaaaagaatacagaaaaaacgctgatttttaatcattttattttcagaatacatttttttagtctgaaaattttttaaaattcttacctcattctttccctccttaaaaatctatttaaggaatggacgttcacccttcttactctggaacttcaacaattccagataagggtttatccgccaaaatgatttcacttattttgtgaagatttctccagaaactctatatttcttttcagacctgcaaattttgttcttttaacgggagatttgcggaaaatttcggaaaacagctcctgcgtaagttccttccattctccttttttaaaatttttcagcgcttcattcggtttgaatttggtttgctgatgaggtgacgaaaaacggttccacggacagacgtcctgacaaacatcacagccaaacatccagtcgtccatcttatcctgaaaataatccggaatggagtctttcagttcgatggttgcgtaagaaatgcatttgctcccgtcaatcagcttttccgaaacaatcgcattcgtggggcacgcatcaatacatttccgacaagttccgcaatggtcggttacgggataatctgcaacaagttccagatcgcatattatttcagctaaaaaataaaatgagccgctttgtcttgtaattaaatttgcgttttttcctacccatccgattcctgattttctcgcccagcttctttccagaaccggcgcagaatctacaaaaacacgaaatccgaattccccgatttcttcctgaagctctgcaaccatcgatcgcagaatatctttgatgacttcatggtaatcttccgcataagcatacttcgaaattttaaagttttcgagagtagaaattttttcttcggggaaataattataggaaagagaaattacagacttcgaaccttccaccaataatctcggatccagccttttatcaaaatgattttccatgtacttcatttcaccgtgaaagttatttttcagccagttttcgagtggttttgcatcttcctcaagaaagtctgcttttgagatcccacaattctgaaatccaaaactttttgccttggattttataagctgtgtatatttttctgcgtgtgaagtcatgattttatagtgcaaaactaatattattttataaatttgtttgaacttaattcagagaattgctttacaggcatttttcatataccgtcaaataatttaattctaaatattaatatattatgtctttatcagaagttataaaatcaggaaattatgcattaatcgacgttcgtgaacctatggaactggaaatggacggaaacatagaaggtgctaaaaatattcctttgggagaagtggaagacagacaagaagaaattctgtctattgataagccggtgattttgttctgcagaagcggaaacagaagcggaaaggctttggaatatcttacctctcaaggtttgaaggacggctacaacggcggaggctgggctgagctgaaagcaaatctggaagcaaatcagggaactttttaaaaagttcctttttttatctaaaaatttttgaaaatgaacctgaaagaaagatttctgcaaaattgtcttttatttactgaagatcaaaatcttattggagatctgtggtctgaaattgaaaagaaatatactgaaaaagggagacattatcataatcttgaacatctggaaaatatgttctctgaactggatgctgtaaaagatgaaattgaaaatttttctgttctctcattttctgttttttaccatgatgttatttatgatgcttcatcaaaatcaaacgaagaaaaaagtgctgagtttgctgaagtaagactgaaaaaacttaatgtagactcttatttcattcaaaaaatttcggagcagattattgccacaaaatcgcatcatttgtctgaagacagcgataccaattatcttctggatgccgatctttcgattctcggaaaagattctgaagtatattttgattacacgaaaaaaataaggaaagaatattccatctatcccgatttgctttataagccgggaagaaaaaaggttttaaaacattttctggagcggaaagatatttttaaaaccccgatttttaaagaaaagtatgaggatcttgcgaaagcgaatattcagatggaaattgatgggctttgatattgcgtttattaaccaccccgtcaaaaattctttgaatttcgccacccctccagaggaggggaatgtaatgctgcttaaatttcaccaactatttttcagtattatccctttataattgaggagataaactctgtagatttttgcagaaccgcatccggaatttctttgtgcggtgtatgtccgatgttcgggatgatgaatttttctgcggttccgcttacctgagaaattgttttttccacctgatccactgttccgtactcgtcattttctccctgaataaataacaatggcgaatttatatctttcaggaggtattcaatattccagcttctgaatctgttgcttaaccagatttccgtccaggcttttaccatcatttcaactttatcaccgtgatattttgcaagacgttcgggaagattggtggctttgtaagcttcaaaggcatcttttacgccttttacggttatctcttccacaaaaatatgtccggcttcgcaaagagttgcaataactttttcgggatatttagctgcgaaaataagggcaatggttccgccgtcgctatgtccgaaaaggattacattattgatgcgtaattcgtttaacagatcattcaggagatcggcttcctgctccatataattgttttctctttcacaggtaagcataggaaaagattttccgtagcctaaacgatcatagaccaaaacattacattgtgtctgcaaagccagtcttgccggaaaatctctccaaagctgagtgcagcctaaagaatcgtgcaaaaagacgatggttggtttattttcaaacgaatgacggtattctgtataaagttttttcccattgacattaacaatccttccttccatcaactttcagattaattttataaacttggtgtattggtttcgttaaattctttcagtaaattctgaaaaacggtttctaccggaagaacttcatcaattaacgcagaaacctgcccgatttcgagttcaccttcttccatatcaccttcaaacatcccttttttggctctggcacgtcctaaagaagcgattagagactctttgtttcttccgacgttgtagatctcctccaactcgttaaagaacttatttttaaccattcttacaggcgccagttctttaagagtaagatgggtatctccttcctgaagttctgtaattttatttttccagttttcatgagcgcttgcttctacagtagcagcgaaacgggaaccgatctgaacgccgtctgcgcctaaaatcatggctgctttcatctgggaacctaaagcaattcctcctgctgcaatcagcggtttggaaatatgttttcttacattcgggatcaggcagaatgtagtggtttcgtctcttccgttgtgacctcctgcttcaaatccttccgcaactacggcatctactcctgcctcttcgcatttcatggcaaatttcgttgaagaaaccacatgagctacttttaaaccttctttctgcaaagtttcggtatacgttttggggtttccggctgaagtgaaaacgatcttcactccttcttccagaataatctgaattacttcatccagattaggatacaacatcggtacatttactccgaaaggtttgtctgtagcctgtttacatttttggatattttcccttaaaatattggggtacatgcttcctgcaccgattaatccgagaccgccgcaattggaaacggcagaagccagcttccatccggaatgccagatcatgcctgcctgaataataggatattgtatattaaagagttgtgtaatcttattttgttgtgaattcatctggtgaagcttttttgctgaattaaaatctatgaaattgctcatgctgtaaaaataataaaaatagcggttttcagaagattttgagcataaaaaaaccttcagaagttctgaaggttttgatgattattttttaattgaatctcttttccagttggctttaaagttacaagaatcgtaacgtccgtcgatggagatgaatgttgtcggaagttttgaattaacaaatttttcgatcatttcatttcgctttttgttcagcgccatctgctttactctgtcgtaatctgtttccagaataatctggtgagcaggaattacatcttctacttttactatttttaccacttttctttctctttcatccatatcatcaaaagcgttcgtaatgtctcctttgtttaaacctgccaattcatagctgattgttcccggaactgtttctctttcgattttattagatccgtctgctccaggaataactcctgcattgaatttcgttcttttatcgtctgagaatttgaaggtagcatctttgaatgtcatttttccgttgacaattaaacctctgatgctgtctaacttagcttttgctgttttaatttcgtcatccgtaggaacagccattaaaaggatgtgtcttgcctcgtagattttacctgattttttaataagctggattaagtgatatccgaattctgtttctacaggttctgaaatttctccttcctgaagatttaaagcggctgcttcaaaaggttttaccatctgtcctttggaaatgtttttcattaaacctccgttggaagcggttcctttatcttcagagaaaatccttgcctgactttcgaaagattctcctccttcaatatcttttttgatctttttaagcttattgatgagttcatctttatgagcctcggtaagcttagggtacatcataatctgagatagtgaaacttcatctttgatctcaggaagctgacttttatacaaattatagaagtcggttacctcgtttggcgtaacgtctgctttgtccgtaattctctgaattttagcctgtccgtaatattggtctgtatcgattttttcgatcgcatttttcatttcatacccatttctgaatttataggcagccaacattgttttttcgtcaggaaactgagaaagcaactgctgatattttgcatttgcctgttctttaattgcggcagaacggttatcaatcagggtatcttttttcgcttcgtataccaaaagcttattattcagtaagttttccaaaaactcacacttatctatattggaagctccctgctgttttgcataattcatctgctcgttaacgtcagattccaatacaatttcatcaccgataacagcagcaattccgtccactaaatctccctgttttaactgagcgttcatcatatttgtaccaaacaacatgatgaaaattccaaaaagaaaagtgatcttaagtttatttatcattttactattttaaacaagttgcaaatttagaattcttaatgaattacactaaattttttattataaatatttcttaaaaagaggtatttattgtacttctacgtcgaaagttgttaattctttaaactgcttcagtcttccgaacacatcagattcttttacttcctgaattctttctgtcccgaatttctcaactgtgaaagaagccattgccgaacctacgattaatgcagacttcatggtttcgaaatcgaatgttccttttttcgctaaatatgcggcaaaacctcctgcgaaagtatctcccgctccggtaggatcgaaaacttcttccagtggcaaagccggaatagcaaatactttatgatcgtggaaaagcaaagctccgtgttctccttttttaatgataacgaacttcggtcccatttcgtggatctttttagctgcttttaccaaagaatattctcctgaaagctgtcttgcttcttcatcgttgattgaaatcacgtccgttttggcaatcatctgcattagcgtttccaaagctgtatccatccagaaattcatggtatcaagaataacaagcttcggacggttgttcattttttcaagtacggaaagctgtactcccgggtgaagatttcctaataataagatttctgcatcctgcatagaatccggaattttaggatcaaaattttcaagaacgtttacttcagttgccaaagtatctcttgtattcaggtcgttgtggtattttcctgcccagaagaatgttttcccttcttttacgatctcaattccttctatattaacctctctgtttgtgaacatatcaagatactcctgcggaaaatctcctcctaccacagaaacgattccggacttaacgcccaaaatggatgaagtgatcccgatgtacgtggctgcacctcctaaaattttatctgtttttccaaatggcgtctcaattgcgtcgaacgcaacacttcctacaactaaaagtttcatatttttttcaaagtattttaaaagtaaattattttttccattcaaatgtgtccagcagatgtttcatatctcttttgatataatctaccgctggagccaaagaatccggtttcggtcttgtgttaaagtataaataggcagtcacaaaatgtttggtactgtctgtaatgtaaaactgaagattagaagcgctctgacctttgagttcataaaaatttccgtatacctttttttcaggatattcgaaagattttgtgtcgattgcgcttgctttaatcgtatgttcataaaccattttttctgcttcctgaatatgggctgaaaaatcattctgtatcgggtaatacgttacaaaaactttagctttcattttcggatagttcagatagtaccaacaaggcttttttgcgtcggtaatgtttgcaaaatctgaatattcaaatgtataattacagttgttttcgaatttctgatatttcggtgcgggatattccagtcgaagttctccgtaaggcttcggaaccggatcttttccgcaagataccaaaagtaaggctgcaaaaataaaaatggcgtttttaaacattttgcaaaagtacaaattagatttcagatttcggaagacaaatttcgggatttcaatgggttttgagattgagattaaatttttcttttgaggctttgttttttgaacgcggagaacgcgaagattttttttaacagcttttcgttttttaagttcgcagaggcgtttcacttaacgaagacaacaaagataatgacttgttatacattatgcagcattttgtcattctgatcggagcgaagcggagtgaagaatctatttaacacaaagagcgcaattcttttttgaatattattgtgaatattttttcgttcgcaacggcgtttcactcagcaaatgataaatgcataaataattctctttcaataataagaagaaatcattttgtcattcagaacatagcgaagcggagtgaagaatctatttaacacaaagagcgcaattcttttttgaatattattatgaatattttttgttcgcaacggcgtttcactcagcaaatgataaatgtataaataattctcttttaataataagaagaagaaatcattttgtcattcagaacatagcgaagcggagtgaagaatctattttaacgcaaagagcgcgagtctttttcttatttattacgaatattttttcgttcgcaacggcatttcactcagcgaatgataaacatataatcataaaattttatattttttgagattgttttactttgacgcgctcagcacaggctcgcttcgctcctcgcaatgacattaccaaattctgtatgccgtttcataattctggatataattctccaacggttttgggaaggatttttcgtgagagccttcaacatcggttacgatgtaattattttgagtgatgaaattctgccatatttcttctgaatctacttctacattaaaaatttctatgcttaaatttttgtgcgtgagtttatggcttacattttttacacttttgataaacggaattaaatcatcaggaatttcaggtggaaattcaaataactttttccagatgaaatcatcttttctctgttgaattaaaaactgaccatttctgttaacaaaataatatttcagttccaaatcagcggcttttactttttttgtttttaccggaaattcagaaactttattcagggaaaaagccagacagtcttcatgtaaaggacattcgctgcaaagaggatttttaggtttacagatttcggaacctaaatccatcatcgcctgattgaaatcaccgacgttttcaggtaagattaaatgagcgagttcagaaaaataattgaaagcttttgaacttgaaatatcaaaatcatctgcaaaaatacggctcagaacgcggtaaaagtttccgtccacagccggaattttaccctcaaaacaaatactggaaaccgcagcggctgtatattttccgactccttttaactttaagatttcatcgtattcatgaggaaaaacaccatcataatcgttcatgatctgttgcgccgccttatgaacatttatcgctctggaataatagcctaatcctttccaatacagtaaaacttcgttttcgtctgcttcggcaagggtttttacatccggaaagcggtgaacaaaattattataatgtcctaatccctgagcaattctggtctgctgaaaaacgatctcacaaatccagattttataaggatctctggtctgtctgaaaggtaaatcgcgggcatttattttataccagtgaagaagtttattgccgatgtgtctgaagtctgattgttttgttttttccaaaggtttgtctgtctgcatatttatgcttcaacaagctgagcatgacaacgctaaaaattcacttttaataaaacgactagtattagaaatgtcatgctgagcttgtcgaagcgtctgtttattaaatacaaagataatttaattttctttttgaactgaatatacaggagccgctttcagccactggtattttaaatgtttttcttttgcgatgaagcggtaaccttccagttttttgagataaatataggaagcagagtcttttttgaatttcaactgttgattagacagaaaactgaacggaaaatccacaatagaatctctcgtcgttttctctactttgccattaataactctgtaaataaatatagattttccgcgaccctgagactgatcgatgagtttgatatttgatgaagaaaccaccatatcactttcatcgaaacattcctgcggtttcataatataagcttttccttcttttatttcgtcggcgaaaagatctattggatgattttgctgtacttttttatcttcacaactgaaaatcacaaaaattatgggcaaaaagtaaaataacctgcctttcatatttctatttttaacgatttggtagaaaaaaaccgatgaaaaattgcatcggtttgtgtattgattggtttaaatttagtcctgaagatactcagcatcccattcgtttccgtcgtctcctttgtgtccgtctaatttaataacgaaactttttgtagggaaataaggcgtaagacgaatatccagccaaactctgtctttgtttactttatcctgctcaaaacgaacaattttgaatttttcgatcagtttatccggtcctttaattccgtcaaggaaggttacgatttgtcttctcaaatcgtcttcatttctcgcattccagttttcgaaagctcttctgtttaggaaatcgagcaaaactttagttacgtaatcgaatacgcgaacgacagaataggtctgaagcccgatattgtctcctgtaaataatgtttttgcggagaaagccataatttttccgtattcgttcaccatgggaaccagtcccattttttccaactgggaaatttcacttttctttaattcgaattttacggcatccacttcattgatgtttccgtgctttttacctgctgcaacctgagacattaatgttttatgaatttttcctgccagtgaagttgatggcggaagttctacattttcctcctctcctacttcctcagcttttccgcgtccaaccagccagttacaggtcatgatgacattacttctgtgcaattctcctcctgtaagattggcagaatggaataaatccaccacgtcatccggtttatcaagatttgcgaaatccgtcaccatcatcactttgttttcgttacagatttttgcccatttttcaatgactttattggatcccaaatatcccggaattgctaaaatagagtaattgtctctaaggtctaaacggtcgtagtagttcttaaattcttctgcaatggcatcgataaagatcggattatccaaatctgaaacctgatctaaacttgcattgacgatacttacgttgtcaactttgtcgagttcggtatttttgtagaattgagcaaccgttctgtagtttgtttccagttgacggactgcatcaagcgtatttttaagatttagttttaaattctgatcggcagcctgcgctttagatttacaggtatctgccattttatcggcagaatcattgccttccagaagatttacccaaagattaattttctggagaagttcttttctttcatctgctttattgttatcgttcagaaagatttcctttctggcttttctggtggggttcatgtttgcaattccgtctacaacggattctacaaaaccaaaacctccgattttattgagttcggcaagcggattaccttttggctgacctgcgtgttgctgctgtccctgttgttggttttcagctgcctgtaatttactgtccatgattaatgtaacgtctttagattatttttcaagttcctgtgccacttcttttaatacttccacgaatgcagctcttgtctgatcgttttccagcatattgcgcagaattttattggttttaagctggcgtacaattttgttgtactgttcctgctccatgcttaactgctgcaaataatctgatttctgagtaagatttttcggggtgaagtccgcaagattctgaaaacggaactcctcttccactacattaccgtcctccgtttcgtgctgaacgcttacagaaggctggaaatgtttgaagacgtcgtccacagtttttaatcctgttacaatttcagggacgtaagattcgtcggttgtaagctggcttactatcagcgatttattctcctgaatctgctgtatagcttcattggcgtctacttttacttcgtttccgccaacgccataattaaacattgccatattattaatattttgagattttcgatgttggtgtgtattgtctttatcagcatcaaatagctgaccaatccaatgtttaaatttaaaaaaaaactgtaacatacaaaattttgttaagatttttcttgaaatattaactttttaaattaaatatcaactaaaaactgatattttgtgatgtcactaaactatgaaaaattaaataaaaaacgcaccatttctgatgcgtttttcatttctaacaatttttggcttgtcttaccaaatttttattctgtcctgcggagctttatacattttgtctcccggtttgatgtcgaatgctttgataaaagaatcctgattgaccaacggaccgaatgctctgaaaattcccggcgaatgcggatctgtttttacctgattggtcatatactgatctgtggattttgttctccaaacagttgcccagctcatgaagaatctctgatcctgagtaaatccgctgattaagcccggatttccgtgatctttaagatacatctgaagcgcatcgtaagccactgcaactcctcccaaatccccgatgttttcgccactcgtgaacttcccgttaacgaagcttcctttcaccggttcataagcgctgtactgtgctgccaattgtgctacttttgcgtcgaagtttttacggtctgcatcggtccaccagttatttaagttaccgtctccatcgaatcttgaaccgctgtcatcgaatccgtgagaaatttcgtgaccgataacggctccgattcctccgaaattaacggctgcatcggcttttggattgtagaaaggcggctgaagaatggctgcagggaaaacgatttcgttgtttgatccgctgtaataggcatttacggtttgcggcgtcattccccactctgttctgtctaccggttttcctattttatctaagtttttctgatattgccaagctgaaacattctgtaaattggaatataaggttgctccctgtttcggagcttttacttttaactgggtataatctttccatttatccggataagcaattttcacggtgaattttgataatttttcctgtgcttttacttttgtttccggagacatccaatccatctcgttgatgtgtgttttgaaggattttagaatgtaatcgatatacatttccatctgtgcttttgcttccggcgtgaaatatttctccacatataattttccgaaggcttcacctaaaacgctgtttaccaaagaaagccctcttttgttcatgggacgctgttctttttgcccctgaagatatttggagtagaaatcgaatctgatctgctctaaattttcatccagattgcttgcatttccattgattaagtggtatttcagatagtctttcagtaaaggaagatttttctgggtaaggaaggaatccatattctggtaatacttcagctcgccgatgatgactctgtcggtatttactccggcatccttcagatatttcggaagatttacgtttttaaccaaagccggcaattcagatacgtttttaggattgtatcttaaattggcatctctgttctgttcaagcgttaataaatagtttgccaactgtttttcgaaatccactaagttttttgctgcagattctgaacttttatagcctaaaacgccgaatagttttccgacataggtctgatattctgctaacgttttggtattggcttcatttactttctggtaataatctcttcccagtccaagatcagggccgcctagatagactgcattcattttagaatctttcaggtctgcacctactctccatccgtagaaagaattgtctcctacttttgttgcttcaagcagatatttctgaagatcgccgatgtttttaatggcatcaatttttgcaagatctcctttaatcggagccagtccttctgcatttctcttattggtatccataaatgaggcatacaaattctggattttctgtccttcggaaccttcaggataagattctgataaaattttgttcaggatgtccaaagaagcatcgtctacattttctctgagtgcattgaaagaaccccaacttgctttatcggaaggaatctgagtggtttttacccagtttccgtttacatagctaaaaaaatcatcttggggacgaacagttttatccatgtacgataggtttaatccttcttcttttgcttccattttttccggttgtacaatttcaactccttttaccggttcaggcttttgggtatcggcagtttttgttgttccacatgaatttaaaaataccaaacctgaaaaggcaagtattccgatatttagctttttcattaaaaattgtttttgattttacacaaacttaccaaatatacgaattttgattataaatgataagtgataaataataattgataaaaagcctgtaagtgaagatttgatatttttattttttgattttgattgagtgagtattagtatttcatataaagctcgaaagagttcttaaataacctgagttcgggataagtcttcttaaacgcaaaggttcgctgggttttgttttgcattatagtgggtattttttgttcgcaacggcgcttcaatcagcaaatgatacagggatttctgaattggagataatttctattcatttttcctgatgctgaaaaaaatgactgaaatcctagccgcgattgcagcaattgtctgagctcattttctgggattcggcgcggctccgccgcgccgaatcccagaaaatagcgagtgcggaaagcgcgaaaaagctccaaaaaacaaaaaaaccgttcactgctgaacggttttggttatatttaaaaattgtgattaccagattttaattctttctgccggttttttgtacaatttgtctccttctttcacatcaaacgctttgtagaaagcatcaacattggttaaaggaccgaaacttctgaaatatcccggagaatgcgggtctgttttcacctgattgatcatgtatttttcgctggataaagttctccataccgtagcccagctcaggaagaatctctgatcctgcgtgtaaccgctgataactcccggatttcctttgtctttcagatacatctgaagagcatcgtaagcgatgtttacacctcctagatctgcaatattttctccgttggtaaaggttccgttcacgaaagttccttttacaggctcgtatttatcgtattgtgctgcaagggcttttgttgctttttcgaagttggctttatcttcaggagtccaccagtctaccaagtttccgtctgcatcgaactgcgcacctgaatcatcaaatccgtggctcatttcgtgaccgataaccgcgccgattcctccgaaattcaccgcagcatctgctttaggattgaagaaaggcggctgaagaattgcagcagggaatacgatttcgttgtttaccggattgtagtaagcatttacagtctgcggtgtcattccccattctgttttatctaccggtttcccgattttagctaagtctttgttgtactgccattctgcaatattctgaagattagcatatagatttccaccttttgattccggcgtgatggttaatttcgaataatctttccatttgtccggataagcaacttttaccgtgaacttattcagcttttccattgctttttgcttggtggtagaagacatccacgttaatccgttgatgtgaaccgcgaagcttttctttaagtaatcgataagctcaaccatctgtgctttagcttctgcagggaaatatttttcaacgtataatttaccgaaagcttctcctaaagatccgttaattaattcgtaacctctcttgtttaaagctctctgctcctgctgtcctcttaaatatttaccatagaaagcgaatctcatgtctcctaatttttcgcttaggtaagctgcacttccgtggatcatgtggaatttaagataatctttgataacaggaaggttctgtgtattgatgaatttatctaaatttttgtaatatcctaattctccgataattactttatctgtatttacaccaactgctttaagataagccggaaggtccacatttttcaccaaagctgaaagctgagccattgtttgcggattgtactgtagcgtattatcacggctctgctcgttggttaaatatgtttttgcaatgcttttctcgtaatctacgataccttttgcggcagcatcagcgtttttatatcctaattcttttaacatagaagcaacatattttgtatattctgctaaagcttctgtgtttttttcgtttactttctgatagtaatctcttccaagacctaaagatgcgtcaccaagataaacaacgttcattttagagtccttaagatctgcatctactccccatccgtagaagttattttctccttctttggttacagagattaaatatttctgaagatctccaacggatttaatggcatcaattttattaagatttgcctgaatcggtttgataccgtctgcatttctctttgccatgttcatgtatgttgcatacaggtcctgaattttcttgccttctgttccctcagcaaatttgtctttcagaagagagttcaggatggtcatggagttgttgtctgtatcttcagccagtttgttgaaacttccccatgttggtttatcggaaggaattttggcagtcttcatccaagttccactcacatagttataaaagtcatcttgcggacgtactgatttatccatcaagctaaggtctaaacctttgtctgtcgcctgagcgttcacggtttgtgaacaaattcctcctattaaaagcagagaaagcgttaattttttcattataattacaatttttacaataagtgtaacttttttttatttcgttactttttatgaaaacaaatttaattaattattaagatctgtttatattttaatttttaatttgaaaatctcttcttatcaatctttgtatttcgaaattaagtgaaacgcctttgtctatctttagttaggcaatttaatattaaaaaatgttgtttcccttgcgataatttaaacgcaatgccagacaaggaattattaaaaactctgtttaaaaaatttaagataaacaaagatgtttcacttatttttgaaagacaactttttacaatcctaaatttaagacgttgcaatttcttttacatttccggtacgttttaaaaatccccaggtctgcatttcgcctttcagtgcttttcggagacttctgaacagtacaatatacatcagccagcgatatccgaaacgctgaggaatcacatacagcagatttaccaatttctctctctgcatgatgaacgcaataaaagccagagacgcatccaccaaaaggaaaattaaatagtaactgaatattttcccgccatttccggataatattccaaaaaacatgatgacatcggcaagcggtgagaagaacggaataatatactggaagagtaaaatattcggcattgcccagagtcctaaacctttgtatttcgggttaaggaaagtctgtctctgtttccagaacatctgcatgattccgtacgtccatctgaaacgctgttttaaaaactgttttacactttccggagcctctgtcacggcaactgcacggttttcgttggcaacggtgtacccttctcttaaaattttaacggtaatatcacagtcttcagctaaagtatcggaagaatatccgccaacttcttcaattacagattttctgaaagctccgatggcaccgggaattacagtaatggcattgatattcgcatatgctaaacgatcaaaattctgactggttgtatattcaatggactgccattttgtaagccagtttacggtattgcccacttttacatttcctgccacggctgcgattttttcatccggatccgagtttaaaaatcttgcaattaaatattttacggcatctttttcgagttttgtatcggcatctatgcagaccacatattccgcatcggtttgtgaaatcccaaaatttaaagcagttgcttttccgccgttggttttgctgaaaattttcagtttcggatgatcagaaaaggcctctttcgctttttcataggtagaatctttacttccgtcatccaccagaatgatattgaaattgggataggtctgttttaatagattgtttaatgatgaaacaatgttgacttcttcattgtacgccggaacaataattgaaaccttcgggtaagattccaaaacaggaaattctcctaattttttctctttttttcgttctttaaatgcccagaataacataatcatcaatctgataagtcccaatgcaataaaaatggtaaacaaggccaccaaaaaatgactgattccataaataatggttgccaaaagcagattaagctgcatcacataataggctcttgttttcggtatggaaggcatcagttctgctttgttcttatgcagaatactggcaagattggtaaaatgatatccttgtttctgtaaagtcggaattaaaactttcaacgcttttacggtttcttcacgggtttcacctcctgcatcgtgaaggagtatgatatttccgcgttcggcttttacacctgccaaaacacgttttacaatttcatcggcttttatccccggctgccagtcttcgggatcgatgttttcaccaatatcaagataattctgctgtctcgccaaagcaaccggaacaatttcttccgaagttgtaggctcagaatcggcattgtaaggcgctctgaacaggatggtactgtgtcctgtgatgcattcaatcaataatcttgtcagtttcatttccagcaaagctctttcggggcttacttttgctacattttcgtgggtaaaggtatgattgccaatttcgtgaccttctctgtaaattcttttaaccaaaggaaggtttttttcggcatttaatcctaccaaaaagaaagcagcgggaacgtggtattttgacaagacatccaaaacctgcggcgtgtaggtttcatcgggaccgtcgtcgaatgttaaaaccaggtctttctgtggcgcttctccatattttttaacttcgtaagaactgggataggttatataattttcatcggtaatgattttttctttcggatcaatctcaagggcaatttttccgtcatgaggcgtattcagaacgtctaaaacttcgccgtcaccaatgtaatcgaccatcgtctgaccttttacattctcaagggtttttaaatttaattttgataatcctgcaaacgtaagatctttatcgtaaaaattccagatccggctgtcctcgcttcccagtctccagagtgctgttccggcaagaggatattctgaagaaaagcgcatcgtattaaaaatagaagccgcatcgttgaaaaatacagtgtgtgtattgtttttagaatctgtgtaagagtaatttaaattaaaagtattgtcgtcgaaattaattttcgctttgcttgcactcgctttggtaattgcctgcatatacgtcacggaattattctgttccttatccgtactccagtcgtatccgtaagctcccaaacctaaaataattttgttaggggaagttttggctaaaatttttccggtctgtgcttcgatccatttttgagaggaaacgggtcctgcatcgctttcaacggcatattcatcatacgccattaatatgaaataatctacgtaaggatttaatttccggatattgtaatcgtcgttatctaccataatatccatggaaaccaataatttattctgcttaaaagtttcggaaagctctttcatgaaagcaatcaggttttcatcagaatccagattcatatcttcaaagtcgatgttgattcctttgaaattgagtttctggcattgaagcgttaatttctgaataagctgggttctttttttaggatctttaaacactcttcccaaaccttcagaatggaattcctgttcaaagttattgctgagaatcggcattgcggcaactcctgttcttttaatgactttatatcctgccgaatccacattggttttcagatcgccagttttcggatcgaggaaaaaccattccggaaaaacaagattgatgtgtttaatgtttctttttagggacattaaagactgtggatcccacgcaacatagaatgcagaacgtattccgcccggaaattgcgcccagtttctgttttggttttttagtctttcggctcttgctttttcgattttagcaaggttggtgtgcattgttttttcggaaatgaaacttcggaatcctttatattctttggaaattctgttttcctgaagatagggtttgctcgctgtaataacggctttgtaatcttctttaaaaggaattttggggcttctgtcccatttcatcataagaccgagcgccagaaaaagcaatattgcgatgaagataaagattcggcttccccactgcacgtttctccagcgttttttgctgtcagtctgaaaaatctgctttgagttttccacgattttgatatttttctcatgaacgtcaaaaaccgtgaaaaacctatgcagaattaattaaaaaaaaattaaaaaattaactgattatgaatcaattattcaccaaaagggcaacaagatcctgaatgactttctgggatacaaagtgcataaaatccagccgatccagatgcggcatatacaattttgaagtcacttcctgatctttaattctgatggtataagaaacggttcccacttcctttccgtcctctccttttcggggacctgcaactccggttgtagacagagaaatatctgtattgaagagtttctgacagccttctgccatttccgcagcgacctgctcacttacgaccgtaaattcttctacggtttctttttttactttgagaatatcgatctttttttctgtagcataagaaacaatgccgcctaaaaagtaatttgagcttccggaaacagaagtaatcatttttgcgagttctccgcctgtacagctttcggcggtagataaagtcaattttctatctgttaaaatatcggcaagaattttttctattttatcctgtgaggtagcaattacatgatcttttaccaaaggaagtagcttctggatttcgtcttccaactgttgctgcaaaatactgtcgttctctccgcttgcagtgagtctcagtttaacgcgggttcctacaggaagataagacaaagaaaggttttccggcagcgcaagttcccagttttcaattttgtctgccagaatactttcgggaattccgactacggaaacaattcttgtggaaaggtaatgcagactgaatttatcttttaaataaggaacaatctgatctttaattaaaggttttacttcataaggaactccgggaagactgaaaagcagttttccgttttcttccatcatcatgcagggtgcagttccgttatggttctggaacactttggattttgtagggacaaaagcctgttcgcggtttctttccagaatttctattcttccgcgtctttccatataagctttcagatgagcgaaagtttcttcgtctaaagcaatttcgtcattgaaaaattcggcaatggcttttttggttttatcatctcttgtagggcctaaacctccggttgttatgatgatatctcccaactcaaaagcagaagagatggtctttttaatggtttcaatctggtctgaaatggtaaaaatctgtataacttttatcccaatatttttcagttcggcagcaataaagttagaattggtgtctacggtgcttcctgaaagaatttcgtcaccaatggtgatcagaacggcatttttcatataataaggtcgaaaaaaatttttctatacaaatgacggaattttccctgtgacgggcaatataaattgattttttctatttttggataaaattgtttaaaactatcattcaatatgtctaaatatgatgatgcttcatggcattacggcagcgattttcctgaagaacttccaataaaaaacagcgcaacacacaccggaatgttcctgacctggtgtattaataataacctcatctcggaagaattcaaagaagatcatgaagaagatactcaaagcataaaaagaagagaaattacaggcgctgaattcatcatggatttcatggacggaaagttttctgaatatgatctgaacgaaacaggaaatgcttttgcccatgattattacaaagacgacacggatttcggaaaccgattcagttctttcgcagatgattatgtgaatttattcgatacaaaagcggaagagaatgattacgaatatgaaacattttatcacatcgaagatacgtacgaaaattatgatcttatgaagcaggttatcgattatcgttttgaggaatggaaagaatataaaggattggtttaaaataaaaacttgtttaaactatttcagaattaaccataaaaggcacaaaagacgatgttgaagcgaatttatatagtaaccaaagtgctcaaaaagaataaaaatcaaagatttttaaaaattattgtgacctttttgatttgtaatgatcaactttaaataaaagtttaatcagactttaaatatcagtaaaattttctaaacttttttaacgcaaaagattttaacactttagtttcttaagttgaataattaagtgaaaaaagagcacataaatttaaaaaaatcaaagattttttctttttgctgacttttgcggttacatttaaaatgagtttaaacttagttttaaattgcactgttttccacaccgctcaaatgttttttcttgaaagcggaaggcgtttctccgatatattttttgaataatttattgaaatatgaaaggctttcaaaacctacctgaaaacagacttctgtaacaccgtgattttggcgcaataaaagttttgcctgattgatcctgtaattgtttacaaaatctgtaaacgtcatattcgtctgttttttgaagtaacggcaaaatgcaggtgtgcttaaattcacgttttctgcgataatattaacgttgggattttggtcataattttcatgaatataatcgtaaatggttcccatccggattttatcatttaaaaaccacttgatgcgggtgtcttcattattcagttcttttacttcttcggagtctgcaagaatctgtaaaatctcgatcagcccgacaaaagaatgaaaggcgtttttgtttttaatctggtgtagcttttcgacgactttttttttggtttgtcctgagaaagacaatcccagacaagaacgttccaacagttttttaatgttttcgaattccggaacgggcataatgtattcctgaagaaaattttcgcgcatctgcaaaaccatttgtctgcattcggtctgaattttataatcaaaattaagatgaggaacattggaaccgatgagcagtaaatcgctgtctttaaagtctgaaatatttttaccgacgtgacggattccgttggaagcttctacgtaaaccagctctatttcaggatgataatgccagaagaaacagtttttaagggatggtgaaaacagcttaaaagatttcccctcttcaaattcaatattttctttctgaattttcattatgttctcttttgattaatatttaattcaaaattaattaaaaaagttaatacagagcaaaaaagagtcatctccgttaaagtataaatgattatttctatcgatttttgcactttaaaagaaacaataaattattcaggatcgttaaaaggattttaaaatgaagatagataaaagaataataccgttggcaataggcggtcttggaatcggaaccacagaatttaccattatggggctgcttcccgatattgcaagaagtttacagatcagcattccgcaagcgggacatttaatctcggcttatgctttcggagtggttgtaggagctccgattttaattggatattctgtaaaatttccgccaaaaaaggttttgattgttctgatgatgatttttaccctgtttaatgcattatcggcaattgctccggattataacacgatgatgatcatccgtttcctttccggactcccgcatggagcattttttggagtgggaaccgtggttgccacccgattagccgcaaaaggtaaagaagcgttctatatatcgctgatgtttacaggacttacggttgcgaatctcgcgatggttccgctggtaacgtatatcggtcatgcatttcactggagatggtatttcgccattgttgctgtgatcgggttatttgccttattatttttaaaactctggcttcctatgcttgaaaccaatgaaaatactcacttcatggaagaaatgaaatttttgaagaaaaagcagtcatggatggttttaatgattactgcgattggttttggaggattgttcacctggtttagctacattacgcctttgatgaccattgtttcaggaattaaagaaaaccagatggcatatgtgatgattcttgcaggagcaggcatggttgtcggaaatttagtcggcggatatttgtctgacagactgagccctgaaaagacctgtgttttattacttttcttaatgatgagttctttagtgggcgtatttttcctttcagaatatcaaaacatatcattagtactcacctttgtttgcggcgcactgtcgatgtcggttgctgcacccattaatataatgatgataaaagccgcacctaaaagcgagatgatggctgccgcttttatgcaggccggatttaactgtgcgaatgctttgggagcgtttttgggaggtattcctttagaaaatggttattctttcaattatccatctttggtaggcgttggaatgacttgtataggattgatgattgcattccgatacaaacagttatacagttcacaaaaaacagaagaaaaagaaattatagcagaatgtgtttcctgcgatcaataaaagaatcggcagtttcctccggaaactgccgattttcataatttgtagtttttagaatttaaatgtgcatccgcaaacgctcattttgccttctacaacagtagtccattgtccgttccatgttcctccgtaagacgcgcagattgcaggacaaacttctttagcatcttcgttgctccagataggacccgccaaaacatctaaagtatactctgaatctccggttggctgagtgtttaactcaacttcgataacgctcatttgcccttccacaatggtagaccattgtcctgtaaatttccctaaatgtgcggctgcaatacgtccgcctaatttttgtgcttcgtcattgctccaaagtggtcccgcaatgatgttgattttgaatgttgacatgattttagttttttgtttgtttaacattacaaatgtaatcacatcaatgagaaatattctacgtagaatgtaccaaattgataattaggtatttatacttacagtttaattttcagatcaataaaaaagactgccttaaaaaagacagtcctccgttgtttttataataagcagattacgcttctacttcattcccgtttttgcaccagtacattgcattgtaaaggtttcctttcgggaaggatttaaattctcccggcatcagtacgctgaagatttcagtgaaattctgtacatgctgattatccgttagaattgcagccctattccatttggttagattcttcagtcctaaaagagcatcttctaaccatgcaccggctgtaaaattatccagatctgtgtcaagatacatcaaataattcagttctccaaattgctcaatctttgcttttacccttggtaaaacaagattctcaaaatcctctttcgtcacttctcctgttgcgttgaatgctgcaacattttccggagcctctggaataattgttatcatattattatttttaatgtggtttgattaaacggtgaaaacaaatattaaaccaatattaatttaagatgaataaaaggcttaattattgttaaattagagaaaaatattacgatgaatcttaaatctaacgaaccattttggcttttaaaaaacggattggtcgcttcctatccttctttaaaatccaatgaagaatgtgatgtcctgattatcggtggcggcattacaggaagtttagcagctcaccaaatgatgtctgaagggtacaaaacaatccttattgatcaacgcgaactctgtaacggcagtacttcggcaacaacttccatgctgcagtacgaaatagatattcctctttttgaacttattgaaaagataggaaaaaagggagctgtagcaagttataaggcatgttcggattctattgataagcttgaaaagttagccggtgaaattaagtcggattcaggatttaaaagaaaaaaatctctgtattatgcttccaagaaaaaggatgttgcatggctgaagaaagaatttaacgcaagaaaagacgcaggttttaaagtaaaatggcttgaaagtgatgaggtttcaaaacagttcggatttgaaaatacatatggcggaattgtatctgaacagggagcaagtattgatgcttttaagtttgcacatgaattatttaaggtaaatgtaaagaaagggttacaaattttcgacaaaacagaaatgacagatgttgagtattttaaaggatataatttaattacagtggattccggttttcagatcagggctaaaaaaataatatactgcatcggctatgaaagtaaaagtcttatcaaagaacattttgtaaatttaaaaagtacctacgccattgtttcggaaattgatccaaaaaaatttaaaaatatcagcaatactatggtctggaataccgatgagccttatatgtatatgcggacaacggatgacggaagaatgctgatcggcggaggtgacgaagatttttatgatgctaaaaaacgggattctcttttaagtaaaaaagaaaaggagattttaaaaacattgaagaagataaagcccgattatcatttctacacagattttgtctgggcaggaacttttggcgaaactaaggacgggctgccttatatcggggaacataaggattttaaaaactcttatttcatattgggtttcggaggaaacggaattacgttttccgtgacgggaatggaaatggtttctcaatttatgaaaggtaaaaagcatctgctatcaaagtattttaaatttgggagatgattttgaaatttttcatggcttcgcctccgccgaaaccatgaaaaatccgcggcaaaaattgccgcggatcaccacactcaaaatatttgttgtcggaactttgaaaacaacatttcttcttcattcaactttaatggttattagtttttaatcactttagatatttaaatttaatttcttctgataatgagttacagagtataaccatttttctttgccaattccaaaacagacttttcaatcgcctttcccaaatcatccgcttcagaatttccgcgttttttcatttcagcatcaatgaacgcctgtctttttcctgataattcttcgatttctctctgaattttctgtctctcggctgatttttcggcaaccgcttttttaatttcctctttgcttttgcctttcaattcggcaggaagttcttcagctttcacaccggacataaaatttacgtctttttcagcgcggtctaccaaatcccaatgatcgtttttataggcatttttcttggattttgcgaccgttctttccacggcgttggaaaccgactgcacttcggcatttttgtcctgaagcatctgtttgtttttaaattccgagccgcgacttccgtaataaatgtaggtatcattcagcttggtgttgcattctgaaattctgacatcgtaaggtgtttctatataaattactttctggtcgctgtcgatattgaaatactttccatcgcccaaagaagcaccgttttgccagaaagtctgtattccttcatcgcggcttccgcagaaaattgtgttggtgtaaatattctttctcttcgcagttggaatcacttctttatagctgatttttccctgatcgaaaggctcgttgcccgcaatataaatcagtttcatactttgattattgtcatcccatttcagattcattgaagcatcacggatcacggctccgcaatattcgcttccgccgttggttctcaaagcaaacagtttttcggaaaccagatccagatcctgagtaagcggagttacctgtcggatgtaattttcatctctgagaccatcatttccgtattcatacaaagcaatttccacttggggcgcttttccgttgtattttaacgtcgttaaagtattcacgatattccagagtcgggattttgcctgatcgatcagtccgtccatgctgttggaagtatctaaaagcaaagcaacctgaattttattttctttaatctttatttctgaagatttatcgacattctgaaccattgttctctgaaccgccggttctttatattcaaattttgagttttgtaccccgaataaagcggcggttccggctgctaatgttaaaattttaaaagctgtcatgattttgtgttttaaaggatttcgtattttgttttaatgctgtatttcagcttgatgttatcaatattttcaaaagaataatctacattagaatctgctgcttcaagctggatattggatacttttgctctgaagttcatcggcatcatcatatcactggtataatcttcaatttctacgatctcaagcggagttccggctctcttgtccatactttccagaagatagtctgccttatcttttgcagctttcagcgcattgatttttacagtttttctgaaatctgtgatttttgtgtttttaatttccgcaatgttgatgttgttaacccacttctgattcaggctttcaaaaagatttcccatatcagttttctttgttaccttaaactgaagattcttagtgaaaattttcgttttggaataaatattctggtacatcgatttgaatttgatgtcttcgttttttactccgttgtttttaaggatttcaaaaagctgcttttcgttctcggcaagctgatttttgttatctcctttaattcctacattgaagataatttcatccggttctacttccatttctgcaattccggttacttcaatgaaatttttctttgtttcctgtgcgttgatcatacctcctatcagaaataatccgatcagtaaaaaatgtctcagtttcataattttcttttttaattttaaacttctaaagtaaaattacgccgatttcagagtgaaaatcgggagacttggtgaaatgaaggtttggcttggtgaaatcaaaaaaattagaaacgatgatcattttaacgcaatatttgcaaagattttcattgaaattactgtgaatattcttcgttcgcaacggcactgcgttcagcaaatgatagctgaaactattgttttgtgatgaatataaaaaaacagtcctgaaaagaactgtttatctgttggtaagaataattgattttccgcttggcgtgacgagttttttcacctcagaaaaaagtttggttcggatgatgagctcatcatcattttctgaaatggtgtaggtttcggaagttgcaaacgcatcgtcgatatcgtgctcaaaaagtttggtagaaccggactgatctaccgagtaaaaatctactttgtaatcattaagtccggtttggtaaaatttataaacaattttttcattgagatcgctggaaatgatcttggtttcaatgaaattgttttgttcaagaaacgaacaactctgcaagaataatacaggtaaaagaaaaaagtaaaactgttttttcatagtcatgtttggttttagcaaaggtatgtattgctaaatggttgactgttaacagaatttcaattttcatattacatttttttcatataagagttgataaagaattgaaattgcccaaaagatttaataataagattttgtgcgttgtccggatgaatattttaaggcgatattataaattctcttcagatcttcgtcgtttttatcgcagaaagactgataataactgatgatgttttgcatggattttttgctatttcccatattggattgtgaaaaatcttttgctgcttttttgagtgctgtcgtcattttagcaatctgaaaatttttctttaattcttgttgagttgtttccgtcatttcatcatattctttttttgaagaaatatttttcacttcatcattcttttcataaaccagagaagccgtaattgaagaattttctgattcatttttctcaacttccatcaggaaaatctgggtttgcccgcaatctaaattttcaagttctacttctatttcatgatcagaaatatattttggctgataaccgtaaaatgttttaatgttcattccttcaggaagattgatcgttagttttggcttttttccgatattgtataaaaggctttccaattcatctttaaacgtcttttgaatatcttcttcagcatctccgatgaaataattggaacctcttccgtaagtgacgattctccgtaacagatcaaaatccagttgttgcccgactccgatggtactgatgtctattcctttatcgttaaattctttcgactgtttcaaaattgtttcaggatctgtaattccggaatttgtcattccgtcggtaagaagaattactttgctgttgtagtctttggtattgtgtttttgtgcttccgaatagcccatcatcattcccgaatgaatattggtggaacccgaaggataaatactttcaataatggcatctaaatttccggcaacatcttttatttttgatgattttaaaacaagattggcagtatcatcaaattttacaatggaaatgagatcttcgggtttcaatccttttacaaaaactttcagtgccgtttttactttttcaagctttccgccacccatagatccgctgttgtcgataaccagagaaacatttactttgtttgagttttctctagccgatacattttgcgttgcaagaccgatttgcagtaaaaaattttcgtccgaattcagaattgtattgtcataatcaatgcttaaagccacttcatttttcttcggaattttgatctgatgtttgtggtaattcataaaatcttctacaataatcgtgttttcattaagaaatccactttcatttgcgctggaaagaccgttgctcaccgtatgggaaacagagcctgaagaaactcctaactgcgcttttgagatattgaaaagaaatgttgaagagaaaaggtaaactaatgtacttctgtttagaaaagataaatttttcatgatgattaaatttgaattataccacaaacttagcctcataaatcccgcagaaaatacgaaacttggtgaatgaagaatttcacttggtgaataattttttgcacattatatatatgtatatctttgttttatgaaaatgtgtcatcttttcgccatcttttgtttattcatctttgggaatattttttatgctcaaagcaacaaaactgtggaagatattcagtttcagacgaagaaactgaagaaagcggtcgatacaaaagacgaatcttcacaggcagattcttactacaacatcggagaatcgtttttcaacaacgggaactttcagaaaagtgaagaatattacaccaaagcaaaaaacatctacgaaaaattaaacgacaaaccgaatattgaaaaggcaagccgaaaactggcacagtctcaggaaaagcagaacaaaatttctccggcaatcagcaattacaacagagcggcagaagtaagttattctaaaagccgtgccttgaattccaatgacgtgacgagactttccgtcaattctgcggaagctaaagaggaagccattcagaacaatattcagcttaacgagaaggaaaaagacaaaggaggcgaactggctgcgaattacacgcagatggcggatattaatattcagcagaatgatattccgaaagcggaagtaaatcttacgaatgcttataaaatttctaaaaaagaagcaccgcaacaggcattggaaatcaaccagaaattgacggatttttacgttgaaaataaaaatttcgacaaagcaattgaagcaaaaaagaccgttttaaaagaagatttcgttaaagaaaattctaaaaaacaggtagaacagattcaggagcttgccgatatttacatcaaaaaaaatgatccgaaagaggccattgatctgttaaaaaaatcttacggaatcgcgctcgaaaaaggtcacacactggaagcgcagaaaagtgtaaaaaagctcgacagtttgtataacgtttccgaaaatacggatgcttcagtaaaattataccgtgattttctcggaaaactgccggatctggtttcaaaagacaaaagtctggtcgatgaaaaaatccttgaagataccgaacagcgaattgcccaactggaaaaggaaaaacaactgaaagatgaactcatccgcaagaaaaatgttttcaactacagtttaatttttgcattgattgttttaatggggttgattattttcattttcagaacactcaaaaaagttcagatcaagaataaaaaaatcgctttacaatcgctgcgccgcgaaatgaatccgcatttcatttttaacagcttaaattctgtgaatcattttatagccaccaataatgaactggaagccaaccaatatttaaccaaattttcaaaattaatgcgcggcgtgatggaaaattccaccgaagatttcattccttttcagcaggagctggatctgttacagaattatctggctttggaaaaaacacgttttgccgataaattcgattatgaaattgatgtagacgaaagtttaaacacgcaaagtttaaaagttcccggaatgctggttcagccatttttagaaaacgcaatatggcatggtttacgttacagaacaaccaaaggatttttaaatttaagttttgaaaaagaaaacgagcaactcaaaattataattgaagacaacggaatcgggatcgaagaaagcaaaaaacagaaaaccgagcatcagaaaaccagaaaaggacgaggaatgaaaaacactcttgaaagaatcgatctgttaaacgatctgtataaaaaagagatttcctgcacggtgaaagataaagaaaacaattccggtgttttggtgattttgaaattgaatttaatgtaaccactgaatgaagagaaaaattttagcctttgtatttttaatttcatctttcatgatgttcggacaggaaatcaattccgcccgttttgaaactattgttaaagcactgaaaataaacagatcacagatcagaacagagttttacacggaaaagaaaatgccgaatgagaaagattcttacatcgttgtattgcctattttcgatggacaggaagacgaaggaatatacactgtaagaaattaccttctgattactgatgaaaaaggaaatattaaaaataagtattacgatcccgaggaaattacatccgatgcagtcggattaagcggaataacaattgatacaggtttatatacagtaagcaaagacatccgtgctttcggaatcagagtcagctttcggggacaaagccagccgaatccttattcaacagaagagctttctcttttttacagagaaaacggaagcctgaaaaaaattctgaacagattcgaagtgtattcgtacggcggagaatgggacacaagatgtgcaggagagtttcatgagaccacttccacaatagatctcgacaaaaaaacaaccgctaattttacagatcttatcatcaagacacaaaatataaacaggagaacaaaactgataaagggcgattgtaaagactttgaaacctcaaaaacaacctacaaaactttaaaattctccaacggaaaatatcaatagttttttcccgcaacctaaaatctgccacctaaaacctaaaagtatgaaaataaaagctgtaattgtagacgatgaattgattgcaagagatgttctgaggaattatctcactaaatactgtccgcaggtcgaaattttgggtgaagccgaaaatatcaaagaagccgttccgctgattgccgagaaacagcctcaactggtttttctggacgttgaaatgcctttcggaaatgcttttgatgtcctggaagcgaccaaagacttttcctacgaaacgatttttatcacggcattttcacaatattctttacaggctcttaataaatcggcaagttattatattttaaaaccaattgacattcaggagcttattttagcggttaataaagtggcagaaagtctggaaagcaaagaagaacttaaccggaataaaatccttctcgaaaatttaaaattaaaacccgaaaaacaacagttgattctcccgactttgcagggtttcgatgtagtgaaaacagaagacattgtgagacttcaggcagatggaaatttcacgcaggtgtatcttaccgatggttcaaaaaaaatggtctgccgctttttaaagcatttcgatgatctattggaaaatccttttgtaagagttcaccgttcacacatcatcaacacaagttttgtaaaatcttaccataaaagcggaacggcaacactttccgacaataccgaaattgaagtttccggaagtttcaaagacaattttctgaaagttttttcctgattttttgggcagcttaaaacttcgtttgtaaacttcgataaaagccttcacttttctctcatttatgccttccgctcccgcttttttgtttcacaaaaagagctccgctcaagtcgggctgtaaagattcaacattaaaagaaaagtattcagataaaattgaagatctcattttttatgatcttagttaagtgaaatcgaagaattgcgcttaaaaaattaaagtcatcccttaaactttcaggcatcatttttgaacttttcataatcactaaaaaaaatattttttattatgaagacttttcagaaaatagccatccctgtttctttgggtattttgggactacttattctcaattcatgttccgtaggaattccgaaaggtgcaacggctgtgcagaattttaatgcagataaatatttgggaacatggtatgaaatagcccgtttcgattacaaattcgagaaaaatatggataatgtaaccgcaacctactctaaaaacccgaacggaaccataaaagtagataacaaagggtataactacgtgaaaaaagagtggaaagaatctattggtgaagcaagattcgtaggaaaagaagatgaggcacgcctgaaagtttctttttttaagccgatttgggcaggatataatgttgtggatatcgacgataattatcagtacgctttggtcatgggaaataatctggagtatctttggattctgtcccgaacaaaagaaatcccagaaagcatccgtcagagatttttagaaaaagcaaaaaatgtaggttataatacagataaactaatctgggttaaacataattaatctgaattaaaatatcagacaaaaccaaataaagaatcgctccaaaaacggagcgatttttattttaatgaatatgtttttctgcgtgataagagcttcttaccaaaggcgaactttcaacatgtctgaatcctaaacttcttgcaaaatccccgaattcatcaaattcttcaggagtaatgaatttctttacaggaaggtgtttttttgtcggctgcaaatattgtcctaaagtaattacatctacatttgcatttctgatgtcttcaatcgtctggaaaacctcatctttagtttctcccaaaccaagcattacgcctgttttcgttcttctctgtcctgcttcttttaaatatcttaaaacctcaagacttctttcgtattttgcctgaattctcacttctcttgtcagacgttttaccgtttccatgttgtgagaaattacttccggagctacatctactaatcggtcgatgtgttttgtgatcccctgaaaatccggaatcaaagtttccatcgtagttcccggagaaattcttcttactgcatttacggtttctgcccagagaacagatcccatatctttcagatcatcacggtctacagatgttaaaacagcgtgtttgatcttcattaatttaatggaacgtgccactttttcaggttcgtcccagtttacatccatcggttttccggtttttaccccgcaaaacccgcagcttcgggtacagatatttcctaaaatcatgaaagtagctgttccttctccccaacattcgcccatattcggacagcttccgctctggcaaatggtatttaatttatatttatcaaccaaagttctcagttctcggtagttttttccggtaggaagttttacacgaatccactttggtttctgaacggtagtatcctgaactaaattctccatttatttctcaaattgaggttcaaagttagtgatttttttatcgaaacaatcaaagacagacattgatgaaacacataattcagtaattttaaactataaaatatcttatgaaaaacacattctgtattctagcccttattttcagcatattctgttttgcgcagaaagaatttcagccgaaaaattcaaagatcaatgaaactgttgagggtgatcttgacggagataaaattcctgaaaaagtaatagtttatgatattccgaccaacggtgattccggagacgtgcgcgaaattcagattctgaagaaggtaaataataaatggagtgttttggaaaaatctcgaaaagcaattcttggaagtaacgacggtggaatgatgggcgatccgtatcagggaaccgagataaaaaacgggattctggaaattagccattacggcggaagcagttggaaatggggcggtacagacaagtacagatttcagaacggtcatttcgagttaatcggctttttctctgaaagtggaaaaccagaagaatattggataacagtagattttaatctttccacaggtaagatcatttatgaaaaggaagtcgttaacaaaaaagaatacggaaattcgaagaaagaagttttcattaaaaaaggaatgaaaatcaatctgcaaaacagaaatcaggaaaaaagaagagaaattctgattcccaaaacaaaggaaaagatttatatctgatgatattaaagtaaaaaagcacctctttgcagaagtgcttttttaataaacttgtttaaacttttttaccacaaaagaagcaaaagatttaaacactttagtttcttaagtttaatacttaatgaaaaaaagagcacataaattttaaaaaatcaaagattttttctctttgcagacttttgaaatactttacataaatccaataaagtcttttgtaccttttgctgttaaatttaaaattagtttaaacaacttcaatataattttcaaaggttatttaaaatcttcaatggatttgttaattgcgtcaatctgcttattgatgcttgctgcattttgaggattctgtttcagaagttccatttttttggcaagaccgtctttcagcatttgggagatcatcattttcgcctgaggattgttcccgatctgtccttttgcctgattaagcattttggtgatgctttctgtcgctttcagattatcagaactcataatccagttgtagccttcttccgcacttttgcccagttcaggattctggaatttaatgaaaggataaaatgcggctacctgcgcaatattcgacatttgtgaggtcaccttatttttaacgatcaccggtaaaagtttagacaacaaattttcaggagcgccttccagatcaatcttatcggctaaagtacttgcttttgcgggatctatttcaacaatagcgctcaccgaacttcctttcactgcgtttgaaacggcatttactcctttttcgaaaaccggaaggtattttttatccttcgtttttgccagagccgaaatcgctgcagcctgtactaaagttttaggatcattggaagctaatttttctacttctgctcccatcgctttaaattgctcaggatttgataaatccattaactgcaacgcttttattctcgttctgaagaacggatctttaagagcggctgccagtaattttgtagctgccggattttttcccacctgatctttgattccgcttactgcaagatatctgcttttaaattcttttgatcccgcatactgcattgcatattgctccggtgttttggtatcggtaatgtctgccaccaaaattccgtcggcattaatatttaccagatcggcatttttagaaacatcaaaattaaaggtatttttggcttctgcatttacccaaacattgtatcttttcggctttccgttatcatacacatcgattgccagaggaaactggaacggctgatcctgcgtctgctctatggttacggcaatttgttttttaaccggctcgaaagtataagaatatttaattttcggatgtccgcttccgaaataccattggttgaagaaccagttcagatctcttcccgaaactttttcgaaagataatcttaattgatgcgcttctccgttttgatattcataggtcttcagataatcgttcattcctgcaaagaaagcatcgtctcctaaatagtttctcagcatatgaagaattcccccgcctttctggtacgttaccaaatcaaaaacatcttcacgggaatcgtaatcgaatcttaccaaatcttttttgaaatccgcaggattatggatgtagttgtttacatctttcatctggtgataatctgcctgatcttttccgtatttgtattcgttccagaggtattcggaataattggcgaaagattcgtttaccgtaagattgctccagctttctgccgttacgagatctccgaaccattggtgaaacaattcgtgggcaatggtgtcttcccatgtattttcgtcaattaactgtcccggtttctgtaaaatatcacttccgtgtaacgttgccgttgtattttccattgctccgcttacataatctcttccggaaatctgagcgtattttgaccacgggaaatcgtagcctaattttttagagaaaaactcgatcatttccggtgtgtttccgtagatctgttttgcatacggttcgtattctttctcaatataataatctactgcaatatttctccatttatccttcacaatagcgtactctcccactcccataaagaaaagataggtggagtgccttttatccatcacccaatgatcggttcttaaaccgtttgcttctttttgagaatctttcagcaatccgttggaaagggttacgtatttatcaggaaccgtcatgtaaatttcctgcgttgttttctggttggatttatcaatggtcgggaaccaggctgaagaagattccgtttcaccctgcgtccagatttgcgttggtttatccggatctgttccctgtgcattaatgaaatacagaccttttgcatcactgattgctgcacttccctcctgttttacttcattcgggcgtgctgtatatttgatgtaaactgtgtaatcctgatttttctgataggttttgtctaaagtaatttttaaaacatcatccttataatcatactttaaaggagatttttttccactgatatccaacgctacttcatggatcagcattccttttgcatcaagcgtcagttcgttggtcggatagaaaaaaggtgcggctgtaagccattcttccccgttcatctgttctttctgataatcgaaatttacttttagcttcgtgtgtttcagctccgttactttggtatgagtggctctgtatactttttctcttcccgaagtttcggtttgtgcggctgcatttgtggaaaataaaattccacccagtaaagcaatcgataaaatggcttttttcattatttctttcttaaattattttttagttaaaatatcaaaaatatcgtttaccaatgtttcgtaatctccttttttgaactgttctttggttttggcaaatgcttttttcagctcgctttccggattttcgtcgtcgataatctctattgattctacgcctttcatctgaagaattgcatttttcagtgcttcaagatcggcagtttcttcggtatttatttttaaatatttcattgttttattcttttataaacgtattttttgttcctccctgaataatgacaaactgtttttttgccggataaaaatcgatcacaattcctgccatatcaaatttaaagcttgtctcggaaattgcttctaaagggaatgcactttgtcctgttgcctgagccatcagttttttatcttcaataaaaatggtaatttttaacggaatgcctttgctggaataggttcctgtaaacttctgaagatcattctcggaaatttcataggttttgaaacttggcatttcgaaatcttttcccatagctgtttcaatcattttgatggaaatatcattggtatccatttccgactggttagtactgaaagcggtggcaattttcagatccggaaaataaaacaatgcagaactgaagttatctattcctccggtatgaccaaacccggaatagttgccgaaaggaactttcaccaaaccatatccgtaatcatccacaaaagttttcattttttcaagactggattttttcaccaattttccattttcgagaccaagaatgaaagtgaggagatctcttggagtagagatgatatttcctgcgccaatcggaatactcatatccgtttcagatgaagctacatatgttccgttggtgtattgatacgcttttgcctgatctttcgttggatctatttttcctccaacttctgtaagcgttaattttaaaggttttgtaattttatctttcaacaaaacagcatacggttttttgtaaattttttcgagaataaaaccgagcagaatgtaattggaattgctgtattcgtgttttgaaccgggttcaaaatcgcttttgtatttttttataatgctgattaagctgctttctgtctgaggtttggtgttgtactgccaaaactcggcttcactggtcagattatgaatacctgttctgtgctgcagtagattttcgatggaaattttttcagcatttggaatttcaggataaaattctgaaagtttctgatctaaggaaatctttttttcctcaaaagctttcatgattaaaacggcagtaaatgttttactgattgatccgatcctgtattgggtatttacattcgctttctgatttttttctgcatctgcaaaacccacgactttcacaaaggtagggcggtcgttttctgcaaaggcaaagcttcccattactttatgatgtacaaagagagaatcgatatagccagctaatttctgctttacattggtctgagaaaatacaatggcagaaaagctgatcgccgaaagaaaaagtaactttttcaacatacttttgagatttgctgaataagttgaaaaaattcaggagatgttacaaaaaaagtgaagttttcggcttcactttattctttatttactgagaaaatattttagtcttactggattttgcctgcaatgccagaataatttaataactatttcatctgctttaatttcatacatcatcttaatctgattcctgccgataagggtatactttatatcaggaaaattttctaaagatggatgttttacgatattatccatcattgtctgcctgaattttttaatatcgttttctaaaacggcaatttcttttgcagtccatttggcatttagaaaatcaataatttcaatcaacgatattctcgcagtttctgaaattgttattttcattttttattaaaaatttcattcaataaatcgtctgttaattcctgagttttcccggttttgtagtcattctcactttgctccattacttttgcaaaatattcggaactttcaatttcctcccaggaataggttttatgatcttctgaaacttcaatatgggtaataccttttatctgtgacaaaagttttttaatgaaagccacatctgcatattcgtctaaactgattttaatttccatacattttgaatttagatcaaagttaatgaaattatgacaacattttaaatcgcaacaggcgctttaattcccggatgcggatcataattttccagtgtaaaatcttcaaaatcgaaactgaaaatatctttgatttcaggattcagcttcatgataggaagtggtcttggttctctggaaagttgttttttaacctgctcaaaatggttgttataaatatgaacatctccaaaactgtgaacataatctccaacttccagatcgcaaacctgcgcaaccatcatcagcaataatgcatagcttgcaatgttaaagggaactcccagaaaaacatcggcacttctctgatacagttgaagcgagagttttccatctgccacgtaaaactgaaataatgcgtgacaaggcgctaaagccatgttcgggatttcagcaacattccatgcggagacgataagccttctggaatccggattttttttgatctgatcgataacatcgctaatctgatccactatttttccatctgctccgttccagcttctccactgcgctccgtaaacgggtcccagatcgccattttcatctgcccattcgtcccagatcgaaactccgttgtcctttagatatttgatgttcgtatctcctttcagaaaccagagcagttcgtaaataatggatttcaaatgcacttttttagtggttaccaaaggaaagcctttcgacagatcatatcttaactgatagccgaaaatacttctcgttcccgttccggttctgtcggtcttatcggttccttggtctaaaatatgctgtaaaaggtctaggtaattttgcatgttgaaggattattttgagtgtcaaatttagaaaaatcttaatgattttctgctatcataagttaggaaaaaagtcgtaatgaatgtaaacagattttatgattcaaagaaatttcactttacttctacaatcttctgagtgatattattgacagaaaaattctggttttcacttaatccatacattgcttttgccaaaggtgattctgtggaaatcgtcatgattttctggtgatctatcacaatttctcccgccgatgcagaaatatagaaaagtcctttatcggtttttaccaaagctccgttttgcacttttgaggatggatcggatgatattttctgcacaatagattgctgatttaacgattcgtttagttgcctttgcagattattgatttcctgttgaagcatttctcgcccggtctcatatttatcgcccattgagcttttggtatcattatttgaagcgcgcgtttcttcgatcagtttttcaagtttctgaattttttcagcaattctgctttttaccgcttccaatatttttgatttttccatctacagaattttagtttaatattttctcctccaatttaccgtaaaggcagtatgtacgttggttttgatttcagatatactcatttaaaataaatctccactttaaaagcggagatttaatgaatttatttttcaaaaactgcgtaatctccgggtttgaaattaaaatcttttccgctgctaaagtcgcgttttgtcttttcaaaaacatttttaaagcttccggaaagatgtccgtcttcaatagaaaaatttacaggatctttagacatattcaaaacaactaaaacttcatcgtttccgttttttcttatatatgctaaaattttgtcgttagcggttgtgttgagaagatacgtggtaacattagaatcgcctcctcttaatgcaggatttgaagattttaagttgaggagtgtcttataaaaattagcgttctgataaacgttgctccatttgatgacatctttttcaaaaaattccagacgtttcatgttgggtaattcctgacctgaatataacagcggaacgccattccaggttgcagagaatacagccatcggttttgtgatcactccatatttttcatattctgttccgttccatgagttttcgtcgtgattggttgtgaaccaagccctcattgaactgtctccaatcgccgaatattttctcagaagatctgtaagttctgaaaggggctcattttttttgtaataatctgcggatttgtgcatccatttccaagagtagcttgcatcaaaaactttcccgtattccggactttcgagttcatcgaattcgcccagccagaaaagtggttttactttttccacttcaggacgcgcctgctgccagaaatctacctcaacccaggaagcaagatcgcaacggaatccgtcgatattggtttcttttacccagtatttcatggcatcaatcattgcaagacgcatttcctgatttttatagtcgagttcgatgatatcatccattccggaagcgatatggaattttccgtccggatcttttaaatagaaatcgggatgggtttttgtccagatatgatcccaaccggtatggtttgcaacccagtcgataatcactttaaagcctaatctgtgtgcttcattcaccatgtgtttgaaatcattcagagtgccgaattcgggattaatggaggtgtaatctgatgcggcataaggacttcccaaacttccttttttattttgctgtgcaatcggagtgattggcataaaccaaagagtttttacgcccattgatttgagtctcggcatttctttttcaaatgctctgaaggttccttcttttgtatattgtcttacgtttacttcgtaaatgttggtagtgtgtttccagtccttaggtaaatccatcatgttttttgcagctttttgcgtggtacaggaaacgattcccaaacctatcgcagcgattaaaattaattttttcattaattctcttttaacaaaaatagggattgtgatcggaaaaaaggaaatatgagtctctaattttgtacagaaaatgaaattaaagtatgcaataaattgtattctgacctattttgtataaatgtctgaaaccttagccgcgatgttctatgttaatacgcaaattaatcaggttaaaattttaaagtttttttgataatctggttgataaggcattttgttttttaccacaccgaaacagatccttaaaagcttgtnnnnnnnnnnnnnnnnnnnnnnnnnnnnnnnnnnnnnnnnnnnnnnnnnnnnnnnnnnnnnnnnnnnnnnnnnnnnnnnnnnnnnnnnnnnnnnnnnnnnttgctgctgtattaacatctgctttactcttaaatgcagtgttaatatacaaagaaggagcgtaaaactatacgttttacactccttttttattggttaataaaaatttagtttttcagtgacctcgcaattgcggtgggttatttattgttgctcacggattacaaatccgcgaggtcggggtagtaattagtaagtattctttagcgatcctatatagatagcaaaaaatacgaatccaaaaaatgatatagcagagtaagttattactaaaatatcagcaataattcttttagttttactaaatttttgaaccttttcattaatctcctcgtaagaagtaaatttccaatatcttaatcctaataacaatataataggaagacagtatatcagtatagtatatttatttgatggcagggttttcatatcataaaaatgatttaaaaacaataatccaaataccatatttaaacaaggtaataaacacactataataaatcccgaagctttatgtgtattatctttttcaaagtaatgataaaaattagttatctgatagtataaataatctatgagtatcatatatgattttttaatagcccatggcttcattgaattttctttgttcttcggctcttacaccttcattataatatttatctactgcaccttcaatatgctgtcctatatcttttccggttactagtgttgtaattccattagcaagaaaataggttcctgctatagcttgtccccatcctgttggtgaaagagccaaagcagacattacaagatctaatgagttagacatatttacaccattctgagccatatcaacacctgctaaaattaatgctccccctcctaaaactctacctgcaactttggttcctactgctaatctttgagcatttttgacgcttatttccataagtggcacatatattctccttgaacttataagctttggcaatgccttttcaaaaacaaggttagtagtagaatacgcttcgccagctccatataataaggctctttctgcagcaggctggaaaacaaatttgttagctgagaaagcataaccagaccaagatctgagggtttgagagtttttgtgcatttcggaatcatatttataggggtttaacctccaagcattaaaagtgcctattaaaccttccttttcatgtcccagatctgtccaccattttaagtatccaccactattgacaaggttaaagctttgtccatttcgccaggcattcatcattgcagcgtacgcaggagtgtctccaaaagcagtgctacttcctccaccgcctgctgcatcctgccataacgacatctgattgctgaaattagctgctcccaaagtacttcctgcaaagtaatcacctccggttagtgttgtattaggatcaaactcccaatatacggcagaaacattctgcattccgtcaggatctaaaaacattaccggattattataggcataagcgtagggagaccatcgtctggaagtttctgccaaaggatctgttacaccccatcttgcgatgtcgctcatatacatccttgccccgtaatcgatccatcctgtttctgtttgcagctctttaccattgtattggtagctgtatgaaggatttccggttgtctggttatatccttcatgcttcatcccaaaaggatagaagttgttttcttcaagaacttctgcgctgccattggtgtttttaaagtagcttactctaatgttccccaaatggtctgtatagctgtaaatatattgatttttttaggagatatttattaacataaaaataaaacagacagcaaacagaaattattgtctgttttatctgtaaggtttctaaaaacacaaaacccaccgcaattgcggtgggttctttattgttgctcacggattataaatccgcgagatcggggatcagattattactttataaatattctatctacagcaagtgtaacgctatctttctctttaaaatctgaaaaattatttattataccaatcacactttcatttttattaattggtattgaacaataataatgatcaatatttttaggacaatttaattttccttctttaattatctttcttttaatcgtatcagaaatagtataattaaagtatacctgatttgttttaaattttgaaataggaaaatagaaataaaaacttactttattcttatcaaatgatttagtataaaatttactcgcctttttataaagttgtccgtttttatatactttaatttgattttcaatctgtttatcaagatatatatattctatttcatacttttccttaataatttcattattaattttccaccagccttgcttagaattatcatgaatgttcatgtaaccttctattgtataatttttgttaacaccattaatttttattatggaatcattgatttttgttttaataattttataattatttagttcagctaactgaaataaattttcctttttctctttattgcaattaataagcattaatagaataaagatgcttgcgatcatcttaattttaccatccatatgttttataatgccaaccttttttatatccaacttcgttaatagaatcaatttttttctgaagatcttctcttcctttactcatatttttttcaagaactgtttttatagtatcatgtggataaggataatagagtgtagcgctaatgtttatactatcatttcttttaaatatgtcaggaagtcctataatacttaatccgtctataccagcctgaaatctatctgggcttacgtttacagcttttatagctcttccatagccatttattatatattcaaacatgttatttgcttcaatattatcatgtggtctaagtttatctagagaataaggatcaggatcttttgttcctcctgagaaactataaaatgtttcattagtactaccaatcatgtttgctaaataagacgaaagtcctgtgatagctccataagaaccgccttcccatttatcatctgaaggggtggcaaatttcatcatattatattgtccatattgtgctccatctgcgtcagtccaccaacttaaaacaccgaatttattagataatccgaaactttgtccgttttgccatgcagctatcaaatccttgtaggcttgggtttccccgaaagttttcggagtgctgcttcctccaccgcctgctgcatcctgccataacgacatctgattgctgaaattagctgctcccaaagtacttcctgcaaagtaatcacctccggttagtgtcgtattaggatcaaactcccaatatacagcagaaacattctgcattccgtccggatctaaaaacattaccggattattataggcataagcataaggagaccatcgtctggaagtttctgctaaaggatctgttacgccccaccttgcaatatcgctcatatacatccttgccccgtaatcgctccatcctgtttctgtttgcagctctttaccattgtattggtagctgtatgcaggatttccggttgtctggttatatccttcatgcttcatcccaaaaggatagaagttgttttcttcaagaacttctgcgctgccattggtgtttttaaagtagcttactctaatgttccccaaatggtctgtatagctgtaaatatactgatttttttcaaaatcgtaatatccttctgcagtagggacaaattttaaagtggcagcagccggatttgaattgatctgtttagattcatactgaaaaccatttaaataatctgtggtaacggtctcctgtccggatccgtcagggtttttatgaacatacatttttcggagcttttctcctgatgcgctatactggtaaaaagcacgaatatttaccgggcgggaaagagctctgggaatataggtctgattaaatatcaatagacttggctggttcagtatgttgtactcaatctgcaaaattcctttatctatctggctggtcatatttccgttggcatcataagagatggtgtttcctgaagtatcagggtaaccgctgtaattggtagagctgtcggtaacagaagtaagcttattacccgaataaacataactaagattatccattagtgatgctgttccggaaatccctttcgtatatctttggagcgaaataatatttcctccgagatcatagcccgcaatttcgttgtagaaattgttttgaggaacggaagcttccggttcagcataaattccctggctcagtctgttcagattgtcatactggtaagtgtattttcgcaatatatgatcctgtgcagatttccagcttacagaagatatacttccactgtattttcctgcagaggtgtcagtaggatcaaaataagacagagagtatgcaaaaagatcggttccaagatttgcaggatcatttatcgtagtaatagctcctcttagattataggtgtagtctatactctgaagattgtttcccacctttttattggtaagctgggaaagttcgttgtatgagttttgagacagcagttcctgaggattactgtttacctggtgccactgttttttcaggcggttttggctgtcgtattcatacgtctgagagattattttctcggtgtcggaagacaatcttttatgataaattttagtctgcagaaccacacccgtaaaatccagagaagattccgttttggtatagccccctaaatgattaatcgcataggttccgataggtctcctgtttgtatcataccatatatagctttttgtccagttgtcatcctcaatatttttcaccatcgagagtgtgggaagagtctgggtattcacagcatcggcggcattatcgccaatggtattactccccataatctgagcaggtcttgcaggaccgttctgaagataggtatcgtaataattgatggtaagaatctttgtaaacacagcagggtaggcagagcttgtataatatgccgttactccgttcgcatcgaatcctgttgtatttctgctctcattcagtgcagaagagctgtttgccaaagtctgttcagcctgccttcctgtacttccatagttttgtgcacttgtataaattcctgtgtaaagtactcttccgaactggtcgtatttcgtgaaaagccattgttttaatgctcccgtattggcattctgagataagatcatacgatcctgcttatcatataccatatattcccatccttttccgggaatcttcttttccaccagcctgttccagccgtcataatgatactggtagcaaagattgtctaatgtagtttgatctacctgtcctgattgtgccgctaagggagggattacataagccaactgtccatattcgttataaatatagtaggtatctgcatttttatttccgtctttccttcttaacagaaccgtttgtccttttttatttttaaattctatacttacattattatcctcatttgtaactacattctttgtaagcgtactgcctgcatagttaccggaattggcaatggtatatttcgttcttccttcaaaccagtctgtagaaatagtgtactttcttacttccccatcttcgttggtattgtaattaaaatttacaggtttattcgcccagtcattacctgcctgtatctgctgttgaattctttctattggcgagttttccaaaattttctcagaatagatcttttccgctccgtagattgcggaagcattggctaaaggagaggcgtagatcgctccgttctgggttgttccctgcggaacaggtaaatagctttttgtctgtcttccgaacgggtcatattctatatggtttacgacatcgcgtcccagcggtgttgctttgatatcgatcgtctgcacaggctttccccaaccgtcaaaatactggacgttttcagaaactttagagcaatctccgttaagacatgttttgctatatacgtagttttccgaggaagtaagattggtctgtgcaaaatacatcgctacaaacagcaaacctgaaatacttaaaatctttttcataataacattagtgtttatagttgtattgatattcttttaatgttttgaatgatactgttccggatgaatccttttccattctctttactctttttagtcttcctgcatcatcatattcatacacttctcttaaaccggaagggagagttgtggtagtgattcctgaaatgggatcgtatgtataagtcgttatcagataattggctaatgcagggttttttctgaagttatccaaagcggtaagcaatgccggttcataggttccgttcagattatcttcatcagaaagagtaataatatctgtagccaaagaagcaatctggctgtatgctgcaccttccacctttgcaatcaacgaggttttattatatccgtagaccaaggctgttgttaaacctcccggacttgaaacctgaagaagattgccgttgtcatcatacagatccatctttacgctttcttttgtacttccgtctgctatattggttgtaaccacagaagtagggagcagggaagaattggcaaacagggtggatgattttgataccgtttttccgttctctttctcttcagtttttacaggaaaccctttcatatatgcattttccagatgagcatatcctgatatattgattggataagtcaggaatttttcctttatatccccgtcaacaaccgatttcatataatacggcttgaaattgagattgctgatctgcgtttcagactggttttccagcacttttcctcccggataaaataatttctctacctgagttgtctttgtaatatatgcaggtttgctggagtgtttttgagataaaatattcaacggatattcagcatcagaatagttggcaaactcataattgatttcttttgatgccaataaagtattttgctgatcataaatctcttgtttagaaggcagcccgtttttcgttagattatagtatgaccagaaaaaggcgggttctaattgagttcctccattctgaatctttgggtaatcatggggagttttaaaagtcttgttggtatatccttttccgttctcaaaaacttttacattattataaagtacatacggtgacataggatcatcttcggtatctctttcgttgtaaaataaatatccgctgctgctgttatttaaagtaaaagaatcatatccgtaactgatcgttttttccggtgtggtttccgaaatatttttataatattttatattcttaattctctgccctttcgcaggaagagaatttctaaaaggacccggtaaaaatttagtacctgtaattccaaaagttccaattccttttgctccgtctgccgatgatacttcaagggtatagtttcccggattgttggaaaatacaggattgctataattggctgctgcattgctatactgcccgctccagatttcctgactgccttttttcaatttgaaattaaggcgcggatgtatatccggtggcggtaactgcgaaccgatgggatcattgggatccggcatttccggttcaggatatgtaaaagtatctaagttgatgaacagctcaaacctttttattttggcaggatctcccggtatggtaaaattatatatttgtgtagtttcgctatttagcggagaatttactaatgtttctttagtttgaatggcaggatcaaagccatatgcttccatataagctacatattcaggatcactataattaaaatactgttcattactttcaaaattatactggataactcctcctgttggagtcaccactttttccagcataccatccgttacacgtcctataaaatctgtaatattattataaataaaagatgtttcttctattttaacgttgtttttatcattttttcttatggaagccagtacacgttttctcttagcttcctcatcataaggatgcgtaagaatgctgttattaatcaaataactgtaataggtttcccctgcaggattttttaaaataattttatttaaggtgaacggatcattcaccgtctctttcaggctttcatcataagcaaaatcaaatgtaacttcaccctttggagttttaatagattttattttacagtactgatattcaatcttacctccgggaaaaatcttatttttcttctcatattgaagtgttgcaatttcaacacctatcggattgacaatttttgttaaaaaataagatgatttaaatgttggagccacaaaaacagaatttgaacagggatattgtccataatcatattcctgaaaataatatttgtaaccgttatctgctgttatagtaaaattatcagctttaaatgtagttgtattgctgtcccttacgtattcgattttagcattattagggctaagattaataaggctgaatgtattggcagctacgtctctttttattctgaattttcctgacagtcccggtaatgaatagtaatacatgtcatcaaattcgttattaaaatgatcaggcgcggaaggattatcatagcattcgtccaattctcctataacctttttataaataacactggttccgagcaatgaccagccataaccaacatcactaattctgtctgtattttcgtagttttgaatattgtagcttaaacttatcggataacttagagtgttgtcactcataggaatatctaaaagcggaatattgatattgggagttcccgttgcttcattaatgggaacatctgaatagcgcgacaatgatgctattgagggggaggcaattggattattaacagtttccccaatgctactttgtgcatatccttcttgtaatcctaaagccagaagaacttgtataactaaaatatttttcttcatttgtattattttttaatcaatttggcattcgccgttttatcactggttttcaccaccaccagatacgccccttgaatcaaaggctgggtattgattttggtgatcttatttttcgtttttaccgtttcaagctttcttccgcccatatcatatactgcgatctcaacctcaaacgctccctctcttaagccctcaaacccaagctccacatacacataatccgttaccgggttcgggtagatcttgatatcctgcttttcgatcagctgatcaacctgtttatccccaagcttcacgatcttccagttttcttttcccagttcctctgcgctggttcctgcgagtacaattgatccgtcacggttcagcttaatatcagataatctttcctctttttttctggattctccctttacgtgctttctccactgttcgtttccgttttggtcgagatacagcatccagaaagtctcatcatcattttcaatcctgccttccgcctgtgtgtaaccgcccagcaggatgcctttagacctcccgcttccgtcttcctgcttcccggcaatgacactcattcccatcagaacatcccgattcttgaaattgtaggatttctgccagagttcttcacccctttcatcaatggagattaaccagaggtctgtaccttcttcaataccgactgatttatttcccgatctttccgatctggattctccaccgatcagatagcctattgaagtcagcgccagtgttcttacatgatcgtcgccttttcccccgaaattcttttcccattccacttttccgtctttcgaaagtttcacgatccagtaatcgccttcaccataattgttacttgtttttggttgatagttgatggttttactacttccggtctccgtcttcccgcttccagccaaagctccgcttctggaatacactccgagtaaagctccaccatctttagtaggaatcattttttccacttcatccagaccttttccgcctaataccaattgggataattccttcccgtttttatccagccgtaccaccaaaacatctttagaaccgtagcctttcggtgacttctgcatattgccaacgacaaagaaccccatatctgtggtctgaatcaccgcccttgtttcttcatctgcagcactgcctatggttttctgccataattcatcgccaaattcattgatgcggatcagccagaaatcactgccgcctttagaatcctcttttttatccagccctttccctgaatagctggaacccgccagaagaaatcctccttcctgcgtgttaaccgttgccgacaaaaaaatcatggtttttccctgagaaatatttttcccagacttcttcgccctgctggttgagtttaaccagatggaaatcgtaaccgttgttctgctgcaaggtggcagaaggcagaccggaggttgcaggagagctgctgcctgtgatcttttggctgttaccccgaatgctgcttcctgtaattaaatactgctgatcgatggttgtggtgacctgcgaaaggaaatcctgcgttgaagaccggatgtctttctgccacaccacttcctgggcggaaacacccagaatgatgcacaaggtaagcatactcatggcgagttttttcatgttcgtgtaattttaaaagttattataaagtgaaaattaagaaagggaatgcttagaaaaatctggaaatccgcattcttaaagaattgatactgaagttgacagaatctgtccgaaatttatttgttttaatcatggctattgtttttttatgagcttttagcagcttgtctttattaatttttgttcagaatggtagaaagaaaatctcatcctttttactcttctgcaaaattacaatccattaacgacaaaacatgtcgctttattttaaaggatgcattttttttcaaacaggttggaaatcatgatgaaattttttaaaatgtatgttttaatgtacgcttcggctccgctcagcgcacggtggatggtttggtttacaatgatttgtttaaaatggagtcttattgatgtacgctgagcggagccgaagcgtacggtggatggtttggtttacaatgattcgtttaaaatgaagtcgtattgtgaagtacgctgagcggagccgaagcgtacggtgatggtttggcttacaatgatctgtttaaatggaatcgcgctgatgtacgctgagcggagctgaagcgtaaaaatatctgcattaaaattttatcggagataaaatctttgcgccttaaatagatagagcgtgttaaaaaatattgcgtctttgcgggtttgaacaactttaggaatgattatttacgatgaggtacgctgagcggagccgaagcgtacgattaaagaaatattgttatcaaaattcttccgaaattcttcgactgttgttcggtattccttcggaaaaaatcccatttttccgaagccgatccgaagaagacccgaacatgatccgaagaaatgagttttcaaaccggtcaaaaccggtcaaaagcagtcaaaaccggtcagaattttttatggtgatggaaaatggacatttctgtggtaattttaacccgttcatcaaaaaacatcattcaaaaacaatcaaaaaaaaaaacagattccataaattcagtcattcaaacaaatcaaccaagcagtacgctgagcgaagccgaagcgcacaacaaccaacgaccaacaaccaacaaccatcaaccatcaaccatcaacaaacagccaaccatcactctcccacttttaccattaattaacattctccgctcttcctttcttcaaaagaaatgattaaatttgagaatgagttttggaaaagatttattaaagaaaataaaaactgcggaattgccgggaatccatgcgcacggtgttttctcgcctccttcccgccctgtttttacgtatgaagaggttttggaaaaaaatccaaagtttgctgccgtaaatattgttttgtacctgaaaaacgatgagtggcatttccctttaatccagagaaccattaatgagcatgatcgtcacagcggacagatctctttaccgggcggaaagcgcgaagaaacggatgaggattttgcagaaactgccgtgcgggagacttcagaggaaatcggcatcgagaaacattatgtacggatgattcgcgaaatgtcgccgatctacattccgcccagcaatttttatgtttatccttatatttcatacaccagaaagaatcctgaatttattctgcagcagagtgaagcggtggaagtgatcgaatttccgatcacctgttttctcaatcttccggatgagccggacatgatggttttaccaagtacggcaggaaatgaagttccggtgattaatttcaacggatatattatctggggcgctaccgcaatgatcctgagcgaattcagccagttgctgaaaaaaatgtaactttgcaataccgtgtttaattgagagatggcgaagaaaaacattttcaccgacgcgttcggaactccttattttttaaaaaggctgattatttttattttaggaattgtatcttacagaagattcaacggctttaataaactgaaaatcaccggtactgagtatcttgtggatcttccggattccaatgtgctgtttgtatccaaccatcagacgtactttgcagatgtggcagcgatgtatcatgcattctgctcggtaaacaatgggtatttaaacaccattaaaaatccgatctatcttttaaatcctaaaatcgatttttactatgtagctgccgaagaaaccatgaataaagggattcttcctaaaatctttaagattgcaggagcagtaacggtaaaaagaacgtggagagcagaaggtaaaaacgtcaaccgaatggtagacatgagtgaggtcgataatatcatgaaagccctggataacggttgggtagctacttttcctcagggaaccacggcagcatttgcacagggaagaaggggtacggcaaaactggtaaaaaaccaacgtcctattgttattcctattaaaatcaacggattcagaagggcattcgataaaaagggacttcgtgtaaaagttacgggcgtaaaaccgacgatggaatttaaagcgcctcttgatatagattacgataaagaaaatgcacagcagattctgcataaaatcatgacagcgattgagcagacggaggatttcaacgtcctgcacagttatgatgaagaattaaaagctaaaaaatcagagcaaaaagagtcagataattaaaatataaaatgatgaaaagaatattaggaattttattcgcgatcatagtattagtatcctgcaacagccagaaagtgtattcggatttcgacatcagctattcgaaaagcgggggatttgcaccgatatatgaaaatcttctgattaaaggaaatactgcccattattctttcgaaggacagggtaaaaaatacaagcaggattttaaaattacagacgaagatcttaaaaagctggacaatacactttcccagaataatttcagaagaatacaggaagaccaccaaaaaatttatgacgggattgccacgacgatcaacataaaaaaaggtccgaatgaaggcagtaaaaccgatgcaagctcggtaatgccgaattacaaaacaaactggacgaacattaccaatgcttttcaggagatcattaatactaatgtaaaaaaaccgtaaatacagttgaaaacccatttcatagcgatcggcggaagtgcgatgcacaatcttgccattgcattaaaagataaaggataccatgtaacaggttcggatgatgccatctttgaaccttcgaaatcacgtttggaaaagaaaggaattctgcccggagaaatgggatggtttccggaaaagattacttcggatatcgatgccgtcattctcggaatgcacgcccatcaggataatccggaactggcgaaagccaaagagctagggctgaaaatctattcgtatcccgaatttctgtacgaacagtctaaagataaaacaagagtggttattgccggttcacacggaaaaacaacgattacttccatgatcctccatgtgctgaatttccatcagaaagaggtggatttcatggtgggagcgcagctggaaggtttcgactgtatggtgaaattaagcgaagacaacgattttatggtgttggaaggggatgaatatctttcctctcctatcgatctccgttcgaaatttttgctgtatcagccgaatattgctttgctgagcggaattgcatgggatcacatcaacgttttcaaaacgtttgatgattatgtggagcagttcagaaaatttgtggcaagcattacagcgggcggtgttctggtatacaatgaagaagatgctgaagtggtaaaagtggtggaaaatgctgaaaattatttcagaaaaattccttacaaaacccctgaatacgaaattgtaaacggaaaagttcacctgaaaacagaaatgggtgatgttccgctttcggtttttggcgcacacaatttattaaacctggaaggggcaagacacatctgccatactttgggaattatggatgaagatttctatgaagccatcatgagctttaaaggagcctcaaagcgtctggaaaaggtggaaagagaagacaacggaacattgtataaagattttgcacacgcgccgagtaaggtaaaggcagccgtaaaagcattctgtgagcagtttaaaaacgaaaagaaatatggttttcttgaacttcatacgtattccagcttaaatcctgtttttcttgaacagtacgatcacgcaatggacggactggatgaagcgattgttttctattctgaagatgccctgaaaatcaaaagaatggagccgatttcaccggaactgatcaaagaaaagtttaagaatgaaaatttaaaagtcttcaccaacgcggaagaacttcatgcgtactggaacacgctggataaaactgaaggcgtttatctgatgatgagctccggaaatttcggaggtcttgatcttacgaaataaactgtacagaatataaaaatcaaactcctttcggtctgaaaggagtttttattttatttgattcttttataaaaacgcctcaatacatctttggctccgtcgccgtcgaaatcctgagtgcggtcttctaccaccatatcagattcattaagttttgtgatgtaatacggatacttttcctgcccttcaaaccagaatgtactgttcgcttcaacaaacgtgtatttttggattacaacatctgctttttcacaggtattgttgttttgcgcaaaagaaatagaaaaaagatggctagaagtaaattcgtgggtgctcattttctgacattccgttgaaaaagaaaccagaatctgctgatttaaagatttgtaaatctcggttttttcgacataccatgttccgataatggaagatttattgtctgtgttctgatcttcatcacttccggtgcaggaaataacagagagcagaagaaatgacatgagtattttgttcatattgataaaaagtattctggctgtctaatttcttaaacagaggtattgtaagtccgcaaaaatagataaaattcacggcttataaacgtcatgccgaaaaaatcagatgtttttgttttttaacatcagtcgggataagaaataaatttaaataattgatttataacactatattaatttatcgcaaagaaaaacaaaagatttttttacttattgaaagtttgcaagctaaacaaaggcacttcgtttatttaaaaaacacaaaaatggtattattttgataagttttacgcctttgtatatcttaaaaaatgaattcctgataattgaatctctttgcttaacctaacgtttaagaagacttatcccgaactcaggttatttaaaaatttttgaatattcaggagcccggattcaatatttttgtaatggaaatcgcatccgcaactgtatcgatgctgtaaatctgcatcacgccctgtgtagttgctgcctgagccaagatattctgctgattctgagcgcttactgcattctgaaaaagtatgcctgtagaatgtgccatagcctcataaagatttcccattgccactgcaggagcctctcctaaaacttttacattagcctgagttacggcatcggtgatctgatcattaacttttgtatccataattttagtttttaagtatcatcgtaaagttaaatgatattttttaataaaaaaaagaagcaataaataattattacttctttttgtttaaagatatttaaactaatttcagaattaaccgcaaaacggacaaaagataattgttaaagcaaatttatgtaacaatcaaagcgctcgaaagaataaaaatcaaatatttttaaaaactatggtgagctttttcattgataatgatcaactttaaataaaaaatttagtacatcttttgtgacttttgtggttaaattaaaagtctaaacagacttaaaaactgtttaaattctctaatagactatcctgataaacttcaaacgcaaagtctttgtttttagagttaatattttgagccaagcaaagtgaaacagatttcatctgccattaagcgaacgcttaccatcttatcctgcgtaagtatcttcattcttcttaacaaaacactattttttgcgttttataatttctttagcaggatctttcaaaagcctgataacctcaattttaccactctcagaacaatgaggaatctctgaaaaatcagatcattaaaactctttgctataaagttatttacagtaaaacgccaagaaactctatggagttttatctgtgtagaaatcatattcgggagatattcggcgttccgtaggaacgctatctttaaaacatccgttgtattacagatatcaatcctacggattgattgccagctctattcttatttctacacagattctgctcctacaggagcaaaactcttttactttaaacaatttcttgtttaaactaatttcagaattaaccgcaaaagggacaaaagataatgttaaagcgaatttccagaataatcaaagcgctcaaaagaataaaaatcaaagatttttaaaaactatggtgagctttttcattgataatgatcagctttaaataatagtttagttcatcttttgcgtcttttgcggttaaataaaagtttaaataaacttttaatgaaaactatttaaatgaaattccagatcttaaatatccgctaccgatttcagcattttctgctcccattccggatctttcggatcgaagaataatctttttccggtgtctaaagaacgaaccacgttcatttcatcttcagttaattcaaaatcaaaaacattaaagttttcttcaattctggagggggtaaccgatttaggaatcacgcagaatccttcctgtaaatgccatcttaaaattacctgcgccaccgttttaccgtatttttcgccgattgatttaagatcctgattatccagtaatcctgcgtttccgtttccaagcggactccatggctgcgtgatgatgttattttccctgttgtacacctgaagttctttctgctggaaaatcgggtgcagctcgatctggttgatgacaggaagtaccgttgcatcagcttttaattcctccattttatcttcagggaaattacaaaccccgattgcttttatttttccttcctgatacagttcttccatcgctttccatgctcctttaaaatcagagtacggccagtgaataagatacatatccagataatccagctgcagtcggtctaaagttctctgaaaagccccttttgcctgctcataagaagtatcctgcacccaaagttttgaagtaatgaataattcttcacgatctgttccgctgtttttaatcgcatttcctactgcggtttcattctggtaaatggaagctgtgtcgatcattctgtagccggtttcaatggccttgatcaccgcattttcacattcctgcatatcttccatctgccaaaccccgaatcctaaagccggaatatccactccgttgttcagtgtaattacaggctgccctgtgtatgttttctgttgcatacttgttatttatctatttaattgttaattgttaatttcttttcccatcatcttcctgaaaaggtctttgatatgatcgatctccgtctgataattggtcttcttccggcatccgaaatacagggtgtttttcaatggttttttgccttgccagatcagctgcacttctccgttttcaattttctttttgcagagaaaatcaggaaccaccgccaaacccgttccgcctttcagacaacgcacaattgaattcaggttcggaacaatataattgggacggaagtttggtttatgtccgaaattcagaatccagaactgaaaaagatgctccatatctcctgctgtaccgtaccatttttcgtttttcagccattcttccgcgtgttcgattcccttttcatttaaaataaattcaaactgttctttatcaacctcttttcctcccacaagaatgatctgttcggaagaaaatgcttcatgctcaatattcggcgaaactccttttttgggagtaatgattaaatctaaaattcctttatctaattgatcgagcatttcgcggtattccccgaagctgatgatgagattgaacggcagactggaaacgtactgctccaatgttgtctgaaaggtttcaaaacacatgccgacactgatggtaggtgtgagtttctccgtcgatttctgaaagtttttctccacctcctccagttttgccaaaggttccgtaattgcattatacaaaacctttcctctttccgtaggaatcattctccttccggttctgtcgaataacttatagccgacatacgcttcaagcgaactgagatgcagacttacacccggttgcgaaataaacagggtatccgcagcttcggtaagagtgcctgttttgtagattgccttaaaagttctgtaccattctaaattaaccataggtattacttttatgatgcaaatgtacccaaataatcatgattatgatattttcagcatcaatgaaagcgataaaggcggtctatatttaaaataaaaaactgataatcaatcacatatactaattatcatttaaataatacttagctatgatttttattatttttcttatagcaatttagccaatacctttgtccctgtaaaatttaaacaatcataaaagcaatgaaaaaagtattaattatcaacggaggacagaatttcggacattccggaggaaaatacaaccagactatcgcagagaatactttagaagtacttaaaaactttgaaaatgtagaagtaaagatgactaacgtagatgaaggatatgataaaaatgaagaagttgcaaaatttgtgtgggcagattatattatttaccacactccgatctggtggttccagttaccgaacggtcttaaaaaatacatcgatgaagtcctcaccgcaggacacgccaaaggaatttatatgagcgacggaagaagtgccgataatccagagatcaactacggaacgggaggaatgcttggcggaagaaaatatatggtaaccacaagctggaacgcgcctgcaaccgcatttacgctaccgggagaattttttaatgaaaccagtgtagacaatggaccgttatttggattccaccggatgaatgctttcgtttctctagaaaaattagaaagcttccacttccatgatgtcgaaaaaaacgcagatgtagaaagagacatgaagctgtacagagaacatctcaccgaagtttttgaaaaagaattaaaaccccagctggcgtaatgaagatttatttaacagccgttattaaagccaaagaagaatacagagcagaagttctggaagttcttcagaatatggtaaaagagacagtgaaagaggaagccaacgaactttatacgcttcaccagggaattgaagataaaaaccagtttgtattttatgaaatctggaaaagcgaagaaggtttagcacaacataacgagcagccttacatcaaagctttcggagaactggtggatgaaaagcttcaggagcaaccacagatttatttaacagaaattatttaaaacactattaaataactgaatttcaacagtctatttaacagcaaatatcaacatgaaaaaattaacattactcgtccttgccatctttatggcaggatttatgcaggcacaaaccaaaaagtttaaaaatatggaaaagaaaattttgttcgtcattaccagtcatgggacaaaaggcgacaccggtgaaaaaacaggatattatctgggggaagtggctcatccgtgggaagttcttcacaaagcaggatatgaaatagattttgtaagtccgaaaggcggtacttctccggtagacgggtttgatctgaaagatcctgtaaacaaagaattctgggaaaacgaaaagtataaaaacaagatcgatcattctatgaaaccatcggaagtgaatccggaagaatataaagcgatattttatgcgggaggtcacggtgcgatgtgggattttgcagacaatacagaactggcttccatcgcttcacagatttatgaaaacggcggtgtggttgcagcagtctgccacggtccggctggtttggtcaacatcagactgaataacggaaaatatctggttgatggtaaaaagatcaattctttcaccaacgaagaagaagctgaagtgaaattaacccacgtggttcctttccttctggaggataagctaaaagaaagaggcgcaaaatttgagaaatccggactttggcaggttcatgcagtgagcgaccagagagtaattaccgggcagaatcctcagtctgcgaaaagtgtaggggaagaaattctaaaggaattgaaaaaataaataaactagtttaaactaatttcagaataaaccgcaaaagggacaaaagataatgataaagcgaatttccagaataatcaaagtgctcaaaagaataaaaatcaaagatttttaaaactattgtgaccttttttatttataatcatcaactttaaataaaagttgagttgatcttttttgacttttgcggttaaataaaaagtttaaacagacttaataatgaaaagagcttttcagatatggaaagctcttttgtgtttaccttttgtattaaaaatctatttcccaatcggcatatgggtagaaatggcaatcctgttccacatattaatgacaatacctgccataatgatatctgaaatctgggtttcatcaaaaagttcttttgccttctgataggtttcttcggttaatcctttctgactgattaacgtaatttcttccgcaatcatcagaataacctgctcttcctccgtatacagttcttttgcatctctccacgcattcagcaggaaaattctttgcggtgtttcgccgtacttcaatgcatctttcgtatgcatatccagacagaaagcacatccgttgatctgcgaagctctgattttaattagttctttctgaatcggacttaaaaaactgttctgaagagaagtttccatgcctattcccgctttgtacgcagcaggatgaacggttgtccagttgaatcttgcactcataatattttggtttaaatttctgagacaaagttccgctttgaagtctgcaaaaatcttaaactggtttaagaacgtaatttcgccctgatttcgcttaaatattccggagtgaaacctaaaaaagaagccaccagatattgcggaattctctggataaaccacggatattgggtactgaaatgcacatatagttcttccctggaaaattcataaagatagcggatgcgtctttctgaagcagcatacgcgctctgatagatcatcctgaaataccgctccataatgggatgctttttcagcagctcttcctgatcttttaaatcaatttttaaaaggtgtgatttctcaaccgactgaatggaaaagttcgagacagactgtctttcatacgcaaaagtatcggtgatccaccagttttcaatcgcaaattccgtagtctgctctactcctttttcattgatgaaaaattttctgagacagccttttaccacaaaatacatcgaccggcagatttctccttcagtcatcagattctgtttcttcttactatccatcggctgaaaaaatgaaagaatggaagaaaactcatcatcggttaccgaaataaatttttccaaatgctgcctgaaggtttccatttttttgaaaattgtataaccaaacttaactttatttttttagttttacaaaacaaaaacgtaaattatggaaattgtagctaaaatactcatcgccgctgttgccctcgaacacctttatattctctggatggaaatgtttgcctgggaaaccaaaggaaaagaagttttcaaggcagctttgcctcccgaaatgtttaaaccgaccaaaggtttagccgccaatcagggactgtacaacggttttcttgcagccggactcatctggtcattcttcatcgaagatccgaaatggcagacgaatatcgctttatttttcttaggatgtgttgccgttgccggaatttacggtgccatttctgccacgaagaaaatattttttgttcaggcgttacctgcaattctggcgattgctgcagtacttttaaaataaaatccctaccgccgattttatacacttcatcattttaaagtaaaaaatttcctctctattgaaatagatgaggaatatttttattggtaacctttcgtacgctgagcggagccgaagcgtacagtaagaagatatttgtacagtaaccacatcgcacgcttcggctccgctcagcgtacagtaaaaaatccacagcttcctatcaatataataaacacaatcactgcttcaaaatttctttgagtttcttctttaattcctcaggtttaaaaaatccttcatgatattcaattaaatttccatatttatccagaataatccacaaaggataaaccggctgacttttatttttcgataaagccagagccagctcatgaattcctgaatttccgttagacagataatggtattcttttcctaaaaaacggatgttctcttttattttttcagcttcaaaattaataatataaaaatgctgattgatgaattcaaccagttctttatccttatttaaattgaatttttcgattttacagacactgcaccaatctgtataaagatgaagaatgattggtttcggatcttccttctgctgaatttccaaatccgaaaaagtgccggttttcatctgcgaaagacaaaaacacggcaccaacattaaaaataaaaatatcgttaggcttttcattttatatatgttttttcttataaaaatcttttaaacgcaaagttttaattttttctatttcaaataagtgagcaaagatggatcaacaggttgatttgatgaagcttttccttacgcttcgtgaagcaaatttatttgcctttgctttctaaaaatattcttgttcattagaaaaatctttgcgttaaaattcacaactattttaaagtatattttacccccaaaaaacctcttattttctgcatcggcgcatatccgtacgtcgtatcaaaagtataatgataaggattgttgatcggatcatttacatttttatcaaacggatcaaaaggccgcatcaacggatctttcggagtaaaattgaataaattttttattccgcaatacacttcaaatcccgatttaaaactctttgaaatctgaatattcgccaaagtatacaacggagaatattccggccggtaatcattcggtaaaaccggcagccgcatcggtccgtaaaactgtcctgtaaaatcgactgtcagattatttttaaacttataactcagattataagttccgctccatttcggggcatgaagctgctgcgatttttcattttccccatcaaacttctgataaacatccagatacgtcactcccagattaacgctcaaaggaaaatcaaaggtataatccagatttaaagaagctcctctcgaaattccgtacccctgaagattatcataaataattttcgcaggatcggtatcaaaatctccgacaattttgttgctgaaataggtgtaaaatgcagaagcatccaaattaatcaattgatctccaaccggaattttccatacataatttacatttccgttgatggatttttccggctttaaattcgactgaatcaccacttcacgcgaacccgttaatgcagcgtgatcttcggtaaacaaattcaccacacggaaacccgtcccaaaattgaatcgtaaggtatgatacggattcggcgaaaatttccaggcaaaacgcggagaatgtacggcatgatgaattttgtcataatccaatctgtaacccaacaacaaagtatttttctcattaatttcccactgattctgaataaaagctccaacaatcggcgatctcatcggttcgttggttaatccgtccgcagacaatgttccgggcgtattgtcatcataatatgtctttttaaacgtaacccccagaatcaaatcgtgtttttcgaattttttatcccaatacgtctgggtaaaagccactttctgattcgccagaaaaggattattgccgtaaaaagaattttggtcatgaaaattataggaaaactgagtcataatattttctttcaaaggccattgatagaccccgaaagcttctactctattcgtataaatactctctccgtacacttcactgcttccccgataggatttattccactgcatttctccgccaaagcggtcttcatataaatacctcagagcaaaacttcccaatcggttttccttcctccggaaattccatttgttaaaaactgaaattctgttctgcaaagctccatccgtaaaattgtctttattgtaatcgaatctttttgtatagttgaaataattcatactcaacagcgaagcgacattctttcccaaattaaatttcgtggaaaggtctacattattttcactccaggttgtcgtcataagatctacacttaatttgggtgctgtcaaagcatttttagtaatgatattgatgacaccgcccattgcttcggagccgtaaatagaagaagcaggaccttttactacctcaatcctgtcaaccagactattcggaattccgctcagtccgtaaacggtggacagcgaactgacaatcggcattccgtcaatcaaaatcatcgtgtaaggaccttccagtccgttgatgtgaatatctcccgtgttgcagacagagcaattcagctgaggttttactccattcaccatagaaatagcttcaaaaatgctcggcgtcgggtttttctgaaaaaatttctgcgaatagatttcaacatttacaggactttttgatttgctaatgggttttatcgttcctgtaatcaccacatcatcaatatctttggtttttattacaggcttagaactctttacagaatccttttcctctgatacattcaaagcaagactgtccgtttcctgtgaaaagcaaaaccccgaaaagaagattgcagaaaataatattcgcctcatgaaattataattgttagacaaagctaacaattattttttaatatcaaaactcaactgaaaaatattattaaatcgaattcatgaaaaagtgttaaatttgagaatcaacatataaaagtaaaatgagatatcatcagtcgggaaatattccccaaaaaagacacacgattttcaaatctcctgaagataaattttactatgaacagcttttcgggacggaaggttttcatggaatttcttcgttattgtaccatattcaccgtccgacacagataaaatccatcggcgaaccgaaagacgtagccccgaaaattgttattgataaaaacgtaacgccaagaatgtttaagggaatgaacgtaactcccgaagacgattttatggacagccgtaagttcttaatggtgaacaacgacctgaaaatgggactgtcgaagccaagaaaatcaatggattatttctacaaaaatgctgagtgcgatgagcttttatatgctcacagcggaagcggaattttaaaaacttttgtgggaaatttagagttttctgtaggcgattatttaattattccgagaggaacgatttatcaggtggaactgcattctgatgatacggttttcttcgtagtagaaagccactccccgatttacacaccaaaaagatacagaaacgaattcggacaattattggaacactctcctttctgcgaaagagacatcatcactcctacttttgtggaaccgaaagacgaaaagggagaatttttaattaaagtaaaaaaagaaaaccagattacagacttcatctacgcaacacatccgtttgatattgtgggatgggacggttatttttatccttacaaattcaatatcaaaaactttgagccgattactggaagaattcatcaaccgccaccggttcaccagacttttgaagcccataatttcgtagtttgctcgttctgtgcgagaatgtacgattatcatccacaagccattccggctccttataatcactcaaatattgattcggatgaggttttattttatacggaaggcgatttcatgagccgaaaccatatcgatttaatggatttcacgcttcacccgggaggaattgttcacggaccgcatccgggagctatggaaagaagcatcggtaaaaaattcacggaagaatatgctgtaatggtagatcctttcagacctttaaaaattacggaagaagctttaaaagtggaagatccttcctataaaacttcatggctggaaagtgaagacaatcatcttgaagatcgctctcaggaataatacttcttttggcgactggcttccggcttttagcactgaaattattatcaaaatatattgaggactgaatattaatatttcagtcctttttttgaatcaatttaattaaaacatgataaaaatcttcgaataataagactaagtaaaaacaatatgaactatctttaagactaagaaaaattcataaaaaatttcaatatgcaaaattacatcagcgcagaagaagctatttataccattaaaagcggaaaccgtgttttctttcacggaagcgcctgtactccgaattacttaatcgacgaactagcgaggcaatcccatcgtttggataatgtagaaatggtttccattacccagcagggaaatgtggaaattgcaaaacctgagtacaaagacaaatttttcgttaattctctatttgtttcgtctcctgtgcgcgatgcggtgaattctgacagaggagattttgttcccgtatttctaagtgagattcctatccttttcagaaaaaatatattgccgcttgatgttgctttaattaccgtttcacctccggacaaacatggtttctgtacactgggaacttccgttgatgttgcgagagctgcggtggatactgcaaaaataattgtcgccgtagtcaatcctttaatgccgagaacgcatggcgacggaatgatccacatcagcagaattcataagcttgtatggcatgaagaagaacttccaaccgtagattacggagcaaaagtaggtccggaagaaatgctggtcggaaaaaatgttgccgaattaattgacgataaatccaccctgcaaatgggaatcggaaccattcctgatgcggttttgaaatgtcttcataatcataaagatctgggagtacataccgaaatgctcagtgacggagtaattgatctgatccagaatgatgttatcaataataaatataaaggttacaacgacaataaaaccattaccagtttctgtttcggaacaagaaaactgtatgattatgtagacgataatacggtattttcttttgatgatgtaagtacggtaaatttcccgatcaatatcatgagaaataataaaatggttgccatcaattcggcgattgaaattgatcttacaggacaggtttgtgcagattccatcggaacgatgcagtacagcggaatcggcggacagatggactttatgagaggagcagcattaagcgaagacggaaaaccgatcattgccattacttcgagaaccaaaaaaggagtgtccagaattgttcctttcctgaaacaaggagccggagtggtaaccacaagaggacatattcattgggttgtaacggagtacggtactgcttatctttatggaaaaaatttaagacagagagctcaggaattaatcagcattgcgcatcccgatgacagggaaatgctggaaaaagctgcttatgaaaggtttaagcactaatttttcatttattttaccagattttcaggttccatgtcctaaaaaaaatacaccttcaatttaacataatgaaatagtcggaaaaattcagttaaatggcagtatatttgctaaagagcttttaaaaacaggacattgaaaacgatatataattcgataagagaagaggttataaaacatcccaaagtgaaaaattcggttctgggaaatgtacaggaatggaagcgaagccattatattattctttctgaaatcattaaagatgaactttctgaggctgaagaacttaaaggcggaaaaaagtttgaaattgggaatacgatttcccatgttacccttcagcgtttttttgaaaatgattatcaggacaaaacgcacaacgatctccggtttctgaaaacactggataagatctgtatttttctggggtataaagatttaaatgcctacatccagtttataaaggaaaagagacaggataacgaagaaaacagcagtcagaaatttttccagatggtgtatgattactgcgctaccgtttttgaattttataaacagtttccggatcataaaacggaactcttcaaagatttggtttttaatgaatccccctttctggaaagagcatcgcacttcagcaaagaattgtgcgacagggattttcatctggtaacgaaaaataaccgttcgaattatgaagtattcgatatccatatcgtgacggatgaaccggacaaaaaaattctggaatctcaggaattctggaatcttctgttcaaagtaggagcaacagatgaagagcattttgtaaaccaactgaatacccaaatctatttcatccgcaaaatagacaatgtctggaaaatctgggataattataatcccgacgcaggtagattaaacaatataaaataaagaaagccgcagggaaaacctgtggcttcatttttcgaaatatttttttttcatttgttagcaatacaaatctataaacattattatcaaaacaataaacttaagcatacttaaatgaacttttctttacgattatgttaaattaacctaacgtgcgtttgttaatatttttcgtattagtaagaaattcgtaatttgcattcccataaatataaaagtaaaaatagaaatatgtcaacacttacatttgccgaaaaaattgctcaggctgagaattttttacccatcaacggtacagattacattgagttttatgtaggaaatgctaaacaggctgcgcattattataaaaccgctttcggttttcagtctgttgcctacgctggtcctgaaaccggagtaagagatcgtgcttcttatgttcttcagcagggaaaaataagattggtacttacaacagggctaaagtctgattctccgatcaatgagcatgtaaaaaaacatggtgatggagtgaaaattttggctctttgggtggatgatgcctattctgcgtttgaagaaaccacaaaaagaggcggaaaaccttaccttgagccggtaacgttaacagacgaaaatggtgaggtaagaatgtccggaatttatacttacggagaaaccgttcacatgtttatcgaaagaaaaaattataacggacctttcatgccgggttacgaaaagtgggaaagcgattacaagcctgaagatgcaggtttattgtatgtagaccactgcgtaggaaatgtagactgggacagaatgatcccaacggtagaatggtacgaaaaagtaatgggatttgtaaacattctttctttcgacgacaaacagattaatacagaatattctgctttgatgtctaaagtaatgtccaacggaaacggttatgcaaaattcccgatcaacgaacctgcagaaggtaagaaaaaatctcaggtagaagaatatctggatttctacgaaggtgaaggtgtacagcacattgcagttgctacaaaagacattatccacaccgtaacagaattaaaaaaacgtggtgttgagtttttatctgcgccgcctgaagcctattacgatatggttcctgaaagagtgggacacatcgacgaagatcttaaaaaacttcaggaactgggaattcttatcgatcatgacgaggaaggatatttgctgcagatctttacaaaacctgtagaagaccgtcctaccctattctttgaaatcatcgaaagacacggagcgcaaagcttcggagccggaaacttcaaagcattattcgaagcattggaaagagaacaggaaagaagaggaaacctgtaattttatttgtaatattgagttttgtcaggatgaacagtcttgacaaaactttttttaaaaacacattaatatgagaaaatttttaattggaatgttatttttaggagcaagctttggattaaaagcgcagtacggttcactaaatgatattcttacccgacttgaagaaagaaagggagtcaaccagaatctggaagcggtaaacattgacaataaaaagtttgttttcatcaatgatgaagcagaccataccgaaagggattttattgtcattaaaggaaacaaagcgacttatgtagaagtttttgacgataaagctaccggagaaagcagctcgaatgttttttcaggagatatcgtgagaaataaaaagaacatcatttctttaagagctgatcttctggaaaacaaaaaagttccgatccccgttaccaaaacattgcttttaacaagacaggacaatattctgtacctgatcgacgtaaatacaaaagcgcgatggattgacgaagaatctttttctaaagttaaaaacaaaaccaaatctaaaaagtaaatattttgaacgcttaaactgattaaaaagccttcagaatatttaaaatttaaaatctaacggatttatataaagtccaaactaaattctaaaattatgaaatcatttgtagaatattcatcagattcagatttttctatccataatattccgtttggtgtagcggttttcaacaaagaatacatcggatgctgtacaagaatcggcgatcagatcatcgatcttgcaacgttatacgatctgggatatttcgaagaaatcgaaggcttaggcgataacgttttcgaagcctataccttaaatgaattcatcgagcttggaaagcccgtaacaaatgccgttcgtttaaaaattcaggaattactgctggaaaattctatcttatcaaaagatgaaaaaaccattgaagaagccttctatgagctggatcaggttaaaatgatgatgccggttcatattccgaattacacagatttttacagcagcatcgaacacgcaaccaacgtgggaaaaatgttcagagatcctgcgaatgcactgcttcccaactggaaacatcttccggtaggttatcacggaagagcttcttctatcgtcgtttcaggaacggaaatcaaccgtccgaaaggtcagatgaaaccagcagatgtagaaaaaccggtctttggaccatgcaatcaattggatttcgaacttgaaatggcattcatcatcaataaaaataccgaaatgggcgaaagtatttcgaccaaagatgctgaagacgccatcttcgggatggtggttttcaacgactggtcggcaagagatattcagtcttgggagtacgttccgctgggaccatttttagctaaaaatttcggttcctcaatttcgccttgggtggttactctggaagctttagaaccattcagaaccgcttctcctacacaggatcctgaagttctggattatctgaaatttgaaggagataaaaattacgacatcaatcttgaagtctatcttcagcctgaaaacgaagagcaaaacctgatctgcgaaagtaattataaacatatgtactggaacatgacacaacaactggcgcatcacaccgtaaacggctgtaacgtggaagtcggagatctgtatgcaagcggaaccatttcaggaagcgatccgaaatctttcggttcgatgcttgaattaacgtggagaggtcagaatccgattcagttaaacaacggagaagaaagaaaattcatcaacgataacgataccgtaaccatgaaagcctgggctgaaaaagacggagtgagagttggtttcggtgaagtttcagggaaaattattcctgcaaattaattatatttaaacacttaagtattttaagctaataatatatcataaaattaagttcactttagttttctgaaaatctttgattttcattatctttcactttatggtaactcaaaaatttattaatgatctttcatataaaattgttggagcttgtattgaagttcataaacaggcaggaccaggattatatgaagatgtttatcatcaatgtttagaaagagaatttgaaatattaggtttaaaatacaaaagtgaacttgaaattcctttttcagataaagggaaattaatagattgcaaattaaaatgtgattttcttattgaaaatctagttgttttagaaataaagtcggtttctgaaattcaccaaattcataaagctcaaacgatgaactatatgaatttactgaaagttccaatatcaatttttggtaaattttaatgtcattaatctttattatgaaggctatgaatcttttgcctcaaaaattttcaaaacacttccaatagaatgaaaatcacagattttcaaaaaactaaggtgtacttcaaataaaggaaaatctttaaaactaaattaacttaagtgttaaaaagtaaaaatatgaaaacactcatcccctcagaaataactcccgtgcaactgcagacagttatgcagactgccgtttcaccacgtcccattgcactggcttcaacggttgataaagacggaaacagcaatttgtcgccgttcagtttttttaatatgttcagtacggttcctccggttttggttttttcaccttcgagaagagttcgtgacaataccatcaaacacacgttggaaaatgttctggaagttccggaagtggtgatcggcacagttaattttccaattgtacagcagatctctctggcttcaacggaatatgaagaaggcgttaacgagtttatcaaatccggtttaacgatgaaagatgcagagcttgttcagcctaaattaatcgaagaatgtcctgtaaattttgaatgtaaagtgctagaagtaaaatctttgggcgatcagggtggtgcaggaaatctggtgatctgtgaagttcagaaaattcatatcagagaagaatatctggatgaaaacggaaatctggatcaggcaaaactggatatggtggcaagattgggaagcaactggtattccagaaatacggcagacaatctttttgaagttccaaaacctctggtaacgaaaggaatcggtttcgatcttcttccagatgaaataaaattcagcagaatattcacaggaaacgacctgggaatgttggcgaatgttgaaatcttaccggcaggaaactatcattccgacgagaatgttcatctggaagctcagaaattattactggaaagtaaaatcgaagaagcgtggaaaattctgatttattaagggatttatgagaaaatatttcttcttattattgatattgctgggtttacaatcatgctactatccggttagaaaagattacggaatttacagcaaatcgctcgtattttcaaaagatcaaaaatggctgataaacaatatcaatactacggttgatgctcaccaccgggaaatgatgactgcagaaaccatgaaattatttactcagttaagtgaaggaaaagcttatgatttaaaaacagcaaaatctgaaaacttaatcagtcatgatattccgttcagtccggaaacggaagatctggaagaccttaaaagcaactccgattttaactttctggtgaatatttatactttcaaagttagaaacggtttagatcatactttaggcgtacaagacgaatacagaaaaaatgaaacatttgcgatgatggatgtttatgacatcaaaacattgaaaaagatctacacccttaaagcgtattcggaagtttctgtagaaaaaggtgagaaagcaaccatctttacaccgtctactgaaatgatgacgatgaaaaacttcagaagtcttttaaaatcggtaaaaaagaatgcgatcaggatcaacaaataaaaaggagcaaaaaattttgctccttaattttttcttgtaaaatattttaataacaacattgccaacgtccattagcgttggtttctgttccgaaatttggtgactgacatggtggtacaagacaatttccctgaccgtcacttaagtagtaattatagcatccgcttgcacagattaaaactttttctcctccggcaatatgcttttgagcttctctgcttaatttctgaccattctttaattctgaatttttcataataacttgatttttggtgatttaatttatcactaatatatgaaaaatttttaatttgaatattaattatttataaatccagaaaaatcatattttctctttaatgaacgtaatgcatttttcagtaacttcatgaaggtctttcggaagttgttcttcttcccaaggttcttttgccccaaaagtatgattggctttttcaataagatacagttcagaattcgggttcagaatgtgaagatgctctgcgctttttacattcaccgcctcatcatctgtcccatgaatgattaaataatgtactttcgccatctcggttgctctttccacatcaaaacggtggaaattttcttcaaaatcttcgtagaactgataataatgaggcatttcctgctttgttcttccattcatcacataatacactccggcttctttccatttttcaaaagcattattttttgggaagcgatccagtgtgtctacacttgcaagggtaattaaaccttgaattctttcatcctcaaaacttttgatgatagatattcctcctcccctgctgtgtccgatcaggataatcttatcagcatctactttttcattttttacaaaataatcgattacagctcccaagtccgaaagctctttggaataattattatttccaaacgcttcaagatcagcaaaatcatgagggttttcaaccgttgttccgttgtgcgaaaaattaaatttaacaaagaaaaatccggcttccgcaaaattttcagccataagattccatgcaccccaatctttgtagcctttatagccatgaacaaaaatgaccaacggtagtttctgttctgtttccggaaaaaaggcatcggcaagaaaatctcgggtttcagggttggaaataatgatactttgcttttttgtaatctgcatattgtattgtataataatgtattaaaaactttttttattccaacaatgcattgatagatgcgagcatcgttaaggaaatttatgtttagattcttcattccgttatggtctattcagaatcataatttcgaaacaatcaatttttacttaaaaatagtataaatagaaataaacacaaaggaatatcttatttttgccttatgttggatttaagaaaggtaaccgtcatgcgttatattctgccgcttcgggagggaggttctcttcctgctctggcagaagcagatgatgattttaaatatgttctgaaattccgtggcgcaggtcacggagtaaaaatgctgatctctgaactgatcggcggaaagattacagaaattttaggattgaaaattcccgagcttgtttttgtgaatctggatgtggatttcggaagaaccgaagccgatgaagaaattcaggatcttttgaaaaattccgaaggtcttaacttgggacttcattatctttcaggttccattacttatgatccgagtgtgaagatcgatccgcttctggcttcaaaaatcgtctggctggatgcgtttatcacgaatatcgaccgcactttcagaaacacgaatctgctgatgtggcacaaagaactgtggattattgataacggagcctctttttattttcatcattcatggcagaattttgatgctgcagcaaaaacaccttttaaatatgtaaaagaccatgttttgcttccacaggcatcaaagctggatgaagccgatctgtttgccaaagaagtactgaacgaaaaggtattcagagaaattgtgaatatcattcccgaagactggctgcactggaacgatgcggaagaaacgcctgaagaaatccgtgaaatctatttcaacttcctgaagacccgattagaacattctgaaatctttttaaacgaagctaaaaatgcaagaggataaaatctacgaatacgcggtaatacgattggttccgaaggttgaaagagaagagtttttcaatatcggactggtgatgttttcaaaaaaagaaaaattcattaaagtggaattttatctctgtccgggtaaatttaagctgatgcgaagcaaaatcgattacgaagacgtgatccagaatctggaaagcttcaaaaaaattgcagacggcgcaaaagacggaggaccgattgcacagcttgaaattccggaaagattccgctggctgactgccgtaagaagttctgtggtgcagacttcaagacctcatcccgggaaatccagaaatctggaagatacttttggtaggctttttgaggagttagtaaaataatacgctaaaaaaatattctatgaaatttacgaatgacaatactgcatacaggttttccaaaagcctgttttttatttttctgctcagcttttttacattgggctattctcaggggcccattgaaggaactccgacaccgccaagtgttattcttcccgaaaaaacggatttttcagaaaatatcacgtataaaaatgatgcttccggaaatcccatcaaattggatctgtacaaaccgaaaaatgtagattctgtaaaacttccggtagttatttatgttcacggcggagcatgggcgaaaggtgataaagtagtaagatccaacaattacatcgaaaatttcattttaaagcttgttgaaaaaaattatgctgttataagcatcgattacacccttgtaagcgaaacggtacattttccgatgccgattcaggataccaaagatgtggttcgatgggtaagaaaaaatgcagatcaatatcattttgatcctaataatatcgggtttttcggagcttcctcaggagcgcatcttgctctgatagctgcttacacgaatgataatgaatatttgggaagccctgaattatcatcctattcggcaaaggtaaattatgtggttgataatttcggaccgactgatattaataaacttctgcatacaaaactgggaaaagttccggtatctattgtaggtctgttctttaaaccgattgttgagatcagacaaaaactggtttatggaatttccggctacgatatcaatgatgaaaaaagaaaagccatagattatctggaaacggtttccccgatcaatgagatggaaaacggaattccaacctttattcttcatggaaataaagataaggtggcgccattgagtcattctaaaaaactggtaaaaaagctgaaaaagcaaaatatagaagctgaacttgtagtggtagaagacggaacacacggtttcggaacgaccgataaaaaatatatggatcagcttacggatgacatgatccgttttattgatgcgcacaaaaagtaaaaagttttagtttaaattttaattgaacatttaactttttttatataaccacaaaaggcacaaaagataagataatccttattcaaagtggtgattttaaaagaaaaagatcacaatagtttttaaaaatctttgatttttattcttttgaatgctttgcttattcttaaaattcactgtattattatcttttgcatcttttgcggttaattctgaaattagtttattcaagttttagtttaaattttaattgaagataatttcttttttacaaagaatatttaaccttttatataaccacaaaaggcacaaaagataaaataatccttattcaaagtgctgattttaaaaaaaaagatcacaatagtttttaaaaatctttgatttttattcttttgagtgctttgcttatgctggaaattcgctttattattatcttttgcatcttttgcggttaatgaaatttgtttattcaaattttaattaaagataattttaacatttttcatcaaatgtttttaactattcgttactatgcttatctaaaaattagaatttaaactaatttcgtatgaaaataaaaaatctattttctgtttctgctgtttgtcttttagcattatcctgcagctcttctgatgatattacggaacccacttcagatccgaacagtacggtttctacaacggaagccatgtactttcctccttccaacagtgatgtatgggaaaccaaatctctttcttcattaaactggcatcaggataaagttcaggatcttctgacgtatctggaaaccaaacattctaaaagttttatgatcctgcaaaacggaagaatcgttatggaaaactatttttcgggacatacttctactacaccttggtattgggcaagcgcaggaaaaacgttaacctcaaccgtaacaggaattgcagaacaggaaggatttatcaatatcaacaataaagtttccacatacataggaaccagctggacaaacgcgcctttggcaaaagaaaatttaattacctgccggaatttactgacaatgacttccggtcttgatgacagtctcggagatgatgtaagtccggcaaatctacagtacaaagccgatgcaggaacacgatgggcgtatcacaatgtctatgtaaaacttcaggatgttgtagccgcagcaacgggacaaacttggtcacagtatttcaatgccaaactgagggataaaatcgggatgacaggaaactggatccagagtggtgacaacagtgtatactggagtacaacgagaagtatggcacgtttcggactgatggctttgaatagcggaaactggaatggaactcagatcatcaattcaaattattttcaaagtgcgacaaacacttcccaaaatatcaatttagcttacggttatctgtggtggctgaacggaaagacaagttatcatatgccgcagactcagtttcagttcaacggaaaattgattccgagtgcgccggatgatatgttttgtgctttaggaaaaaatgaccagaaaatttatgttgttccaggcaaaaaacttgtcatcatcagaatgggtgatgctgcagacaatgtgaatcttgctctttcggattttgatgatgtactttggcagaaaataaatgcggtgattaattaaggtgaacggtgaatttgctctgcagtcaattgtgaattttttgcttaaaaatttaatccaacgtacatcaactatcaactatcaactatcaacaaaattaattatccggttcttcatacaactgacttccccaaaactggatatctctttcaagaagattggagtgataaaatacttcttttacttcttcgataattttagcaacagcttccggatcggttgttcgtattctggtttcgtggttgtctttcacgccgcttcctgtgaaatttaaagagcctaaataagcaatttcgtcatcaatgatgtaaattttactgtgaatgaaggttttattggtagaatttccgctattcggagagacaaaaaccttgaagggaaaaagctgtttgtagctgtaatgatacacttttgtcttttttatttttttgacgatggaatctcttatcagaaacattaaaatgacaataataaatccgtaagcaagtttaagattgtttaaaagatacatcaacggaagcaaaaccacgcccaaaccaatcatggcaaataacagagttccggagagacttaccagattgtctctggtctgttttgccttttcgtcaacgtgtttattctgaataatcagtttgtgaatattcttgtcgtagccgtaaaaatcttcgatttcatcgctggtaaccaatcttattttaattcctctggaatgaagataaatcagctctttaattaaaaaaggagaaagatagggagaaacaattttcacatttctctgagcatttctgatatcctgcatcattttagctcctgcactttttcctatataaatatcacaaaccgcattgttgtaaaacatacccatcgttcgaaatcattttattttcgctccaaagaaagaaaaaataaaaaactttgcaaaataattgggtgagaagttgtgagttggaagctggaggatgggagttagaatctggaggatggaagtttaaaatctgtatgcacatttattagcatcaaatcttcctgcttctaacttccctcttccagcctactccatcctacttccatcctactttctactcttttccactcttttcatttcgttgataagcaaaggaaaagcgggttgcgccattccgccgtgatcaaagccctgaagttcatataaagtggtttctttatgacctttgagcttcatcattcgcgccatataagcattttcttcatatcttccgagcagctctttctcgcggtctccggtaattaataacaaaggcggtgcatctgctcttatgaaatgcagcggtgcatattcgtcaattctggcatccagttcatcaattcctttttcttttcttgtggtaaaatgcgagatcatctgtccgctgaaagggataattccagcaaatttattagcatcaattccgtatttgttcaggtacattttatttaaacctaccataatggcaagataacctcccgcagaatgtcctgaaataaagacaagatcttcacttcctccataatttttaatattcttaaaaacccatgctgttgctgcggctgcatcttcaatgtatttcggagcattaactttcggagagagtctgtaattgactccaatcactgcgattcctttatttttaagcccttccggaatttccttttcacctccggttaatcctccgccgtgaaaccagatcaccgtaggaaaatttttcacatttttcggaatataaatatccagcacgcatctttcattgatgtaagcatcagatttactggttttttcatcataataatggatattattttcggtacggtattcctgagaaaaaagcggtgtggaaaacaggataagaagtaaaaatagcagaatccttttcattataaaacttttatggtttaaagatacaaattgtctttcagccaaataaaaaatgaacccggaaaaaccggattcatttcagattaagaattaaaaaaattacttaaaaattaaagttaagtcttgagaatacatatcttccgttctgcccaaactgtgaagttgatcttgagtaaataaactgatcgttattggaagaagcaggaaggtttttcgttgggtaaatatcaaataggttattgacaccaacggtaagtcctatatttttggtcaactgataagccagagaaacatcggttatgattttatctgtaatttcctgatgttcgttcggagaaatgacaccgtctccgtttgcatcgataatatcgggactcgttacctttccgaagtaggtatttctaagatagaaaatagcatttccccaagtaagctgattggataagctggcttttactctgggaactgcttcttccagatacactctcgatgcttcggaaaaataaacattttccagatttgaagactgtaataatccggatgaatggatggctccgacttttctggtctggttaagattgatcgcaaaattattatccaatttgatgttggagaattttgcattatgcgcaagaacaatatccagtcctctggtttccgtatctattgcgttggtaaaaagctgtacggcatttactctttcggcatcgtaaatcaactgcgttgccggagaaacggcagatcttgcaaactgaccggtaagcagaattctgttatcaattctgatgaaatatccgtctgcggtaagcgtaagttttgccgaaggaattttataggtaaatcctacacttgcagattttgaagtttcctgtttcagacttggtatttccaatgaattggcaacttttgaatcgttgctgaacgttcccacttccagaagctgtccgtttgtaaacaaagttgacgttacattataataaatctgatgaatggaaggcgctctgaatcctgtagaacccgcaaatctgaaattaaggtctttatttactttgattcttgaagccagtttataattgaatgtagaaccgaaatctgaataattttcatatctcacggctgcatctgccaataaccagttggtaaaattgaattcaacatctgcgtatccagcaattgcctgtcggtttttatttactgcgttttctggtttaaatccactgaaaacctgagaacctcccggaagtgtagcgccgaaaaagtcggtcggacgaactgtatttccggtccagagatttccggaaacatcatacgtagcgtaagatgcttcttctcctgctgttattttgaaattttcgtaacggtgttctgctccaaaagccacattgattccgctccagacatcatatttctttgaaaaatctaaattgattgtattttgggaaaatcttaaacctcctgcatcaaattcattcggagaattgaatcttagagaggtatttcctgtatttttaatatcataactgaaggaattctgcccaaaagtattgctgaaatcgatgttccagcctttccagtctcctttaattcctgcggaaagcgaaagatcctgaatgtctgttccgatctgcggcagataaccgttgggatacaatcctgtaaatgttctgctttggttaggtcttctgaaaaatcctcccgaagttccgtgtctgaagctgtatccgccaaaagtataaactttccagttgtcgttcaacggaacttctacattggcaaaaagctgatggttattcagtttagactgtcccacctgcatattgaaatcttttcttgacaaacctctgtaagcaagttcctgatccgtcacattcgtatttaaaattccctgtaatgcggaaattgtattcgccgactgaatctggttctgtaacgtcggagaaaaataattgacttcctgcgcatactgatgaatataattgatgatctgttgggaattcggagtattattgatattcgtgaaaagggatgaaagattcacgccgttatttaaagcacgctgttcgatcgcgttataagcattgaaaatgtttccgctttctgttcccgctctgtaggtaggatttctgaactgggatgtccacgtaatgttataaaatccgcctttcttcccaattttatttccgtagttaaggtctacctgaatattctgtccgtcaaaatctcctgtgtgatcgttggccgttggagtaagatttccgccatagcttagttgtcccgtcagttttccggtatctcttttcaatcctaaattgatgactccggcaatggcatccgaaccgtactgcgcagaagctccgtctcttaaaacttcaattttattaatggcaaaagacggaatggcattaagatcggttcctactgttcctcttccgggagatccgttaacattgactaacgccgaagtgtgtcttctttttccgtttaccagaaccaaaacctgatcgggacccaaccctctgagctgtgcaggatccaaatgatcggttccgtctgcattggtttgtatggttgatgtaaacgacggtgcaatgaaattaaggatttgtgcaacgttcgtttgcggtaaaataaccgaagattctttgatattgaaaacgtccaccggaacagggctgtctactttagaccttgctccgcctcttgatcctaaaataacaacttcctctaagttgtttgtttttactgtatctttttcctgtgcgtatgcaaatgttcccaggaaaaataataccgatgccgaaaaaatagtttttttattcttcatacattcctcactttaaattcatgttttaaaagtgcaaatgtaaattatatttattagtccacaaaattaatagactaaaagaattcagaaaatgaatattgtcatcttctattttttaaagttgaaatgaattttagatcttggtgagtttcgcgtatttcaggataagatttttctcgccttcatgctggaagactactttggctttgatattctgaggatctgttccgtcgaggaaagtcacttctccgattccgaaacggtcgtgtcttaccttatcacccacttcaatatcctgagaagaagctccgctcggattgataatttttgcggtacttacaggtttcagtttgcgtggttctgcaatcggttttgagctgtcgcttctttcgatggttttcttttccacctttttgaagcttctcatttccgatggatgttcatcaaaaatattggatttgatgcccgaattgttgataaaacgtttttcaatcgcaggatttacaaactcaatatattcttcatctatttcacttaaaaatcttgaaggttccgcatcggtaattttcccccactggaaacgtgaaacggcataagagaaaaacacctgcttttcggctctcgttaaagcaacatagaagagacgtctttcttcttccagatcttctcttgtggaagaactcataaaactcgggaaaaggttttcttcaagccccaccaaatgtacaaccggaaattcaagaccttttgaaaggtgaatcgtcattagcgaaaccatatcctcttcattgttcttatcctgtgtatcggcagaaagggcaatgttttcaaggaaattcggtaagctcggatctccgtcttccaactgcatctgttcttcaatgaatccctgcattgagttcattaattcctgaacgttttctacacgggaaattccttcgggagtctgatcgtcttttaaaaatttaatcagtccgcttcgctttgccacttccatcgcaacgctgtacgcagtttccgttttcagcagtacctgaaatgctttgatcatcgaccagaagtcgtttagtttgtttaaaacaccgttgtttaagcctaaatgcggcgcatacatcggtaaattatccaaaacttttgaaacggcaacattctgtgcatctgcaaaaacaaccagtttattctgggttgtttctccaattcctcttaccggataattaatgattctcatcaatgcttcagaatcgttttcattgactaaaagtctcagataagcgatgagatcttttacttcttttctctgatagaaagagagacctccatagactttgtaaggaatattttttcttctcagtgcatcttcgaaagcacgtgtctgagagttggttctgtataaaatggcaaaatcgctgtattttctctgctcgcggtttctggtttcccagatgtttccggctacgaaattcgcttcatcggcatcggaaagagaacggtatactttgattttctctccttcctcattttcactgaaaacatttttcttgaactgctggaggtttttggcaatcactacatttgctgcgttcacaatattctgcgtagaacggtaattctgctccaaagcaaccgtcattgcatccggatagtcttttttaaagttcaaaatattgtagatattcgcgccacggaaggaatagattgactgtgcatcgtctcccacgacacaaatattttcaaattttgaggctaaagctttaacgataagatactgagaatggttcgtatcctgatactcatccacaagaatgtatctgaatctgtcctgatattttgctaacacttcagggaaacgggttaacaattcgttggtttttaacagcaaatcgtcaaaatccatcgatccgtttttgaagcactgctctacataccgctggtaaatctgcccgatgaatttcatattggctttttcatcggcttccatcaattcaggattgttgaaataagcttttacggtgatgaggttatttttgtaggtagaaattcttgcctgaacttttttgggtttatacagatcggcatcaatattcatgtctttcaaaacttttttgatgacatttaatgcgtcctgttgatcgtaaatggtaaaattggaaggatatcccaaataatgtgcctcatttctcagaattcttgcaaaaacagagtggaaggttcccatccagagacttcttgcattgctctgtcccacaacttttgcaatacgttctttcatttcttttgctgccttattggtaaaggtaagcgccaaaatattaaaaggatcgattccgttggtaatgagatgggcaatccgcatggtaagtacacgcgtttttcctgaacccgctcctgcaagaaccattaatggtccctgtaatgtagtaacggcttcaaattgtgattcattaagtcctttcagataatcctccatgctgcaaaaaatttttgggaacacaaaattagtgtattatatggagaattcaaattttggattttgatgtttcaagaaaatctgtttttattttatatacgttctcacgcgggaaatcatatctcccatgtcaaaaggttttgcgataaaatcgttggctcctgcatcaagagcagactgctccagtcctcggcttgcggacataataagcaccggaatatcttttaaattttcatcggctcttatggttctgcatatatctcttccgtcttctccggaaagccacatatccattaggataacatccggtttaggctgtgtattcagtgcatcgagcatatccgatcctttatagaacttggcaacggtaagtccttcaagctccatcatcatctcaatagaatcaacaattgcaggactatcatccaagactaaaatttgtgtagacatgttttatattttaattttaggtatttcgaagcaaaaatcagacccctttccttctacggagtgaacataaatttttcctccggttcttttgatgatctccgaggagatgtaaagtcctaatcctaaacccggaaaggtatgttcttttgttccgcttacccggtaatattgctcaaaaactttatgctgtttgtcttccggaattccaattccgaaatctttcacactgaattttatcatattatctttcatctgagtagaaacaatcacttcatctgcatcaggagaatatttaatggcattactaatgagattgctcattacctgagaaatacggtgcctgtctgcggttacttttccgatcttgcctttcttgaagataattttgtgtcttgccgtcatctgctgttctacaacaatatcttccacaagctgatcaaaatcaaaatcagattcattaagctggatctgtcctttctgaattttggttacatccagaagatcattcacaagctccgtcagtttatcaatctggtcgttcattctttttgccacctctgcatttttataatcgccttttttattaaggttcatttcaataaactgggtatagagttttaaactggtaagcggagttttaagttcatgactggctatgcccagaaagttatctttttggttctgcagttgtttaaaatcatctatatcggtaaaagttccaatccactgatgtatttctccgtcgggattaagattgggaactgctcttcccagaaaccagcggtaaacttccgggtcatcgggatccgaaaattcatattctacttcaaaaggtttccctgtttttacactttcttcccagatttttaaaatatcaggataaacttcaggtcttatgatatttttaatggcttcattggcatctgcttcttttttgaacttcatgtatttgtaccaattgtcgttcatataagttattttgccatgcttatcgcaggtccagacaaactgaggcatagagtccgcaagatctctgtattttttttcactttcctgtacttcttttctggcttttacaatatcggtaacatctactgccatattaaggatcgcataaacttccccattggagtttttaagcggtttataagaaaagttgtaataaaaagtctgaagtttgccgtctactacatacaagatcagcagggtcttctgttgcagaataggtttttcctgttttaaaaatttcttttaataagccgataaatggctgtccttccagttcgggaagtgcgtcttcgagcttcattcctattacggaggcatcttttccccaggttttcagcatcctgtcgttggcaagttctatgtataaatcttctgaatgataaatagcggtggaataatctgactgtctgatgaggtcttcaaaacggtactcactttctaaaagtttctgctcggaaataacgtgctcggtaacttctgtggctacaacacttactccggtaattttgtgatcctcattatacacaggtgcataaatgaaattaaaaaagtgttcttcgtaatttccgaatttttctaaaaaaaccgaccatttattgcctttaaaaacttctcctgttctgtaaacattgtctaatatttcgaaaattccctgtggtctaatttcaggaagtacttcttcaagtttttttcctataacggatgtatcttttccccagagttcaagaatctgctgattggcattactgatgataaaatcttcccccataagcaaagacatcgctaccggagcctggctgaataatattttaagcgactcatgagagatattctggtctaaaaagtttttcattacaataatggtttctgttttacaaaattaatttttattctaaactttcactgaaaatatgataccactttttaacataataaaattttatttcaaagaagtgcttttaaagctaattttattttgattataatgtaacaattaatgtatttttggaactaattgacaaaacaatttctactttatgaaaaagcgacttctttctgttgctgcagcggctttcttcggaatggctcttaatgcacaacaaattaaattcgaagagtatgacttaccaaacggtcttcacgtaattcttcatcaggacaactcggctccggttgtaacaacaggggtaatgtatcacgtaggtgcaaaagacgaggtaaaaggaagaacaggttttgcacacttcttcgagcatcttttatttgaaggaacacccaacatcaaaagaggtgactggttcaaaatagtttcttcaaacggagggcaaaacaacgctaacacaacgaatgacagaacgtattattacgaaactttcccatcaaacaacgagcagttgggtctttggatggaggctgaaagaatgcgccatgcggtgatcaatcaggttggtgtagatactcaaagagaggttgtaaaagaagaaaaaagattgagaatggataaccagccttacggaaatcttttcacaacagtacagaaaaatttattcaccaatcacccgtacaactggcctacaatcggttctatggaggatcttaatgctgcgaaattagaagagtttcaggcattttataagaaatattatgttccaaacaacgctactttggtagtggcaggagacattaagcctgaacagactaaaaaatggattaaggagtattacggaggaattccgaaaggaacagtttacccgaaagatttcccgaaagatgctcctattactcaggaaaaagaagtaacggctacagatcctaatattcaacttcctgcttatgtatttgcgtacagaacgccgggtaacaaggagaaagatgcttatatcttagatatgctttcttcttatttaagcagcggaaaatcttctgttttatacaaaaaattagtagatcaggataaaaaagcgcttcaggtacaggcgtttaaccaaggtcttgaggactacggtatttttgcattctttgcgatcccgatgggacagactacaaaggcgactttgcaggcagacattgatgcagagatcaaaaaactgcagacgactttaatttctgaagaagattatcaaaagcttcagaaccagtttgaaaaccagtttgtaaattctaattccaatattcaggggattgctgcttcactggcaaccaaccacgttttgatgggcaatacaaacctgattaacaaagaaattgatatctacagaagcattacaagacaggatcttcagaatgcggctaaaaagtatcttaattccaaccaaagaataatcatcaattacgtacctgagaaaaagtaatctaccggtatttaggttaaaatgattatttaaaaattaaatttttacaaatgaaaaagcaattaacatatatagctgcagcatttttcttcgcaggaatggtttcagcacaaaagatagatcttaatgccatgccaaaaccgggaccaactccgaccattaacattgcaaagccaaaaactttccagctaagcaacggacttacggtaatggtggtggaaaacaataaacttccgagagtaagcgcaagtcttagtatggacagagcgccttattatgaaggtagtgtagcaggggtaagtgaaatcatggcggaacagttcgaaaacggaaccaccaacatgagcaaggatgaattcaacaaaaaagtggattatcttggagcgaacttaaacttttcttctaacggagctgcggcaaattcactttcaaaatattttcctcaggtgttgagcttaatggcagatgcgatcattaatcctaaattttctgctgaagagatccagaattctaaagacagagcaattgaaggattaaaatctgaagagaaaaatgcgtcttctattgcttcaaaggtttctaacgctttaatgtatggtaaaaatacatcaagaggagaatttgaaacggtagaatctatcaataaaattcaattggcggatgtacagaatacgtacaaaaaatattacgctccggacaatgcttatctggtaattgttggagacgtaaaatttgatcaggtaaaaccaatgattgaaaaagcattcagcggatggaaaaaagcaaatactccaatctctcctttagaaccagcttctaatgttgctaaaacggaaattaatgttgtagatgttccttctgcggtacaatctgttgtttctttgaacaacctgaacacgctgaaaatgaaagatccgaactacttccctgcaacgattgccaattacattcttggtggtggcggtgaagcgagacttttcatgaaccttcgtgagaaaaacggttttacttacggtgcatactccaatcttagcgcaagcaaatattctccgcagttttctgcaagcgcaagtgtaagaaatgaagttacggataaagcggtaaaggaatttatgaatgaacttaacgcgatttctaccgtaaagcctgaagaacttgaaaatgcaaaagctaaactgaaaggttctttcatcatgtctctggagcagcctgcaactattgcaagatttgctttaaaccaaaaagtacagaatcttccggatgatttttataccaattatctgaaatctattgataaggtaacggctgccgatgtttctaatgctgtaaaatctaccattcttcctaaccagagcagaattttcattgccggaaaagcagcagatatttctgaaggtctggaaaaattaggatatccggtaaaatattttgataaagaagccaatcctgtagcaaaaccaacaacacagaaagtggatgcaggagttactgttgcttctgttgcagataaatacatcaacgcaattggaggaaaagcaaacattgataaagtttcttcttacaccgtaaatgcttccatgtctatgcagggacagaatatcgatctgaaaatgatgaaagcgaaaggtggaaaagaacttactatggttacaggtatgggacagactcttcagaaacaggtattcgacggaaagacaggatactctgagcaaatgggtaaaaaagtggaaatgaagcctgaacaaattgctgaaaagcttaaaaatactgaacttttcccggagcttggttttgcaaaatctgctgactacaagcttgcaggaattgaaaaaatcggcggtgaagattcttatgttgtaaaaaacggagatactacttattattacagcgtaaaaacgggtcttaaaaccggagaaacaaaaacagtaaaagccatgggacaaaccatgactgttcctactacatactcagattacaaagatgtggcaggcgtaaaaatgccttataccattaccgtaagccaaatgggaatggatatgacaatgaacgtaaaatcgtacgaagtgaatcaggcgaaagattctgattttaaataaaaaccttctgttcttacagtaaaaacggcaacaattgttgccgttttttatttttcttaacatttataatatctttctttgtcattcggtaaaaaaagattaaatttgcccattcaaaaagatatcaaattaatggattctatatttatactattgatggttcttattatgatcgccagtattttattggttatcatcgttatggctcaaaatcctaaaggaggaggtctttccagtactttcggaggagcatcttctgctcagtttggagtacagagaaccaacgactttatggaaaaagcaacatggactttaggaggaacaattattgttcttatccttttaagcgttgtaattacagggaagccttcggcaacagctccggttcaggcgcctgcaaaaaaagaagctccggctaagcaaccttcagctcctgctgcttctacaacaactactccggttcagactcctgcaccaacaaagtaagtaaattttatttttacatatataaaaagcaactcgatcgagttgctttttttgtggtttataccgttggaattttactttaattagttctgaaagaattccagtaatcattctgatcttccccaaaaaggcagtctataaaagaatccaaagacatcttatataaaatttcctgattcatttctttacaatcggttgcaaaaaattcaggattgagctgaatattttctctgtctacaattaaaatattttcaggacagtaaaaaggataattcctgatatccgaattggtagtaattaattttcttcccgaagccagtacctcaaaggttcttatcgttaagccattctggaaaggtttattaatatccagcacagattttgttttcttgtaaaaatcgatgatctgatggtgattcagcttatcaaaacttacttttgtaatatcaaactgcttcaggtttttatcaatcatctttttcagtcggaatgcgattcttcccattgcatagtaataaaagtaagatttcagattcagccgatctgccattactctgatcttttctcctacaatataccgatccgtatgagcgcttccgataaaaacaatgtcatattccggtttctgagaatactgttgtaaacttttatattcatcaacataaaacaaaggtctgaaacttatgttatattttaccgaatcattgtattcaaacgtaaactttttgtcgaaatatttaagattttcaatcagattgggatattccgtcaatggatcaaaattgtagtaaatcatttccattccgggattatcattctttattttttcaagaaaaaaaacaggaatggcctctccttttatcaggaaaaaataatcgtattctttgtctttaatttcttcaagaatccggttataataattgtttattttaagatggtagaatcttttattaagacggataatacccttcgaaaaattggaattggaaggtctttcatcataaaaatccacttcagcacccagttcagaaagtctttttgctatggctctttcatatttaaaaaaactgactgacagaaaaagtatttttttaccctttaaagcaatcattttaaaagcccttttactttcatttcttccaaagattctttgaactttacatcctgaatattctgttgcagaacccaatgggtaaacttagacattccttcttcaaaagatattttcggctgaaaatttaattttgattttattttgctgatgtctgcaaaattatgtctgatgtctcccagacgaaactgcccggaaacattaatttcaaaatcgacattgtagaattttctgaaattttccgctaccgtagttactgcggtagaaaccccagtccccacgttgaagacttcgccgttagctgcatcattttcaatacaacgaattgttgcttccacggcatcatccacatgaatgaaatctctggattcgttaccgtcttcaaaaacattaatatcgtttccgttaagaatctgggacgaaaaaatagataaaattcctgtgtaaggatttaaaagcgactgtccttctccgtaaacattctgaaacctcagcgcaaccggagcaactcccatggaagaacaagcagtcattaccatctgttcctgtgtatattttgtaattccgtagatagaagtcggatgtattttagattcttcatccgttggcaaagcgcgaagaatctgcccgtccggataaataatttcgaaatttccttttcgcatctcttccacgtttctgggtcttggataaatcagtcccaattcgggatgaagatattttccttctccataaaccgctctggaagaagcaataatcactttttttacctgatggggtttatttacgaggatatccagcatttttgccgttccggaaacattcacatccgtatatttctcgatttggtacatggattgtccggtaccggtttctgccgcaaagtgaacgataacatcctgcccttcaatcgctttttcccagtcttcaaaatgagcaacatctcctttaatgaaatttacattccctaaaatatttctgtacaaaggcgaatcctcatcaggattttctccgtggatctgagaagaaagattatccagaaccgtaacttcataccccttcttcttaagttctaaagacaacttacttccaataaatccggatcctcctgtgatgagtattttcatttgatacttgtgaaatgtttattttgttctgtttaaattataataaaaagtccgaaggagcaaaagtaaatattttgctttataaaaaagcttaaatgtggtatattgaataaagtttatttcttttaaatcatacatttccttcagattctttttaaaaccttttgccatttcgggaagattggcagacaaacccgaaaccccgaaacttctttttcctttgcctacaagaaccagactttcattcagaatgtacattttatttttcagggaaaccttcatccagtagtttacatcttccgcatatcgttggtctgcatcaaaatatcctgtattatcaagaacttttcttcggaacattaccgtagaaggctgggcttcatttcttatcaaaagctttttaaaggtaatttccgcaagaccattttttatacggtacggaaaaagaattttattgttatttctcgccgtggcaagaaaatctattttcagatgactattttcaaaatactggatctgtttttccgttttcgtggaatcccactcgtcatcggcatccaacaaggcaatataatctccttttgctattctcaaacctttatttcttgcgcttgaaacgcctccgtttttttgatgtaataaagttatattaagctgagaatgatctttaatgtaagctgtaaccttagaagcactttcgtctgtggaaccgtcattcacaatgataatttcaaatttttctagtggaaaagtctgatttttcacagaatccaaagcagaaacaatggattgtgcagcattatacatcggaataattacggaaaccatctatacttttatattatttttaaaatgctcaaaattaaagcagtcattacaaatggcatcgacatattgaaaaaactgatatcaaaatatgaattaacgatcatattctcatagccatattctgcgaaaaacatcgcaaacggaacaaaaacacagataaacagtaaaactcctgaccaaagcagggtttcataaaaagattttactttaaatgaaagtatacagcctgtaacaatataagaaatacttaatatcaaaggttgttttgctccctgaatagcaaaaggattatgtttcaggaaaacatcaaaatcgggtgcgttttgaaagaaaatataacagaccgcaatcactgtaactaaaaaaacagccgtaaagcgcagtttttcttttattgaaaattcaacaaactttttaaacaataaaatagtcagcggaataactgcggaaagcctcgtgagtaaaattaaagcggataaaaacgatacagccgcagaatttatctttttttctttgatgaatttttcccaaattaaataaacaaaccccgcaatgatgataaaattggaaaacaaatcacttttaacatatatttcccacagataacttggcgaaaggaaaagcagcaccaaaaccgcaagtctctgcctgtaattattaaaaattttaaaaattaaataagcaaaaagcaggaaagaaaaagactgcagataacctacacttccgaaaagcaggtaaaaaggcatcccaaacacaataagaaccggtagattagaagattctcttcccatatgatccggaatatggtaaggatactgcccattgaaaacagccttaattccgacttccatggcagaccagcgatcaacattcagcgtatttccatctactttataattcagataaatactgatgagaaagaagaaaaatattcccaggaaaaaagccgttttataaaaaaattccttcagatgaattttcagataaaagaaacccaatccaaaaaatataataagatatcctgccaaaagcgggatgttatactgttctccgtatttaatgataaaaagagaatttacagcaagataaatacagaccaaactgtaggttttcagtttttctgatattgggatatttgaaaattcagcttccatgaagaatattagttttaagaatttccttcattataaggcagcctgttcataatcgatcttcccagagaaatttcatctgcgtattccagctcatctcctacagaaattcctcttgcaatgcttgaaaagtttacctcaaaatttttaaactttttatagatataatacgctgtggtgtcaccttccatcgttgcgcttaaagcaaaaataaactccttcacttttccgtcattcaattttttttcaatgctcggaatgttcagctgattgggtcctactccttccatcggagaaattttaccccccagaattaaatatttccctgtgtattttcccgtattttcaatagcaattacatcgcgtacatcttccacaatacagatcacctcatcatttcgcttctcgttgctgcaaatctcacagatctcaaaatctgaaaaattgtgacattctttgcagtattttatttcgttcacgagattaatgagggaatttccaaggctcgtggctctggaattgggctgtttcaataaatgtaatgccagacgcaaagccgtttttcttccgataccgggcaatccggcaatttcatccactgctttcgctaaaactttacttgggtaatccatagaacaaaaataatgataattgttgacagtttaccacctgttgtttttatgttaagagcctaaaaataaattttaaatctttttaataatcctccatttccacagttccgttttctaagctcagattaaaaaccttatatttgatcatccaaatattaacttaaaaaaataaaactcaatggttcttaacaatttaaactatccactggattttaaatttaaaatttctacactcgcaagtgatttcaatattacagacaaaaacggaaattacgtcgcttatgttcgtcagaaaatgttcaaacttaaagaagacgttatcatttttaatgatgaaagcaagtctaaagaacttttcagaatcaaagccgatcgatggcttgattttaatgcctcttattctttaactgaaatagcgacaggaagaagctttggaagactggcgagaaaagggatgcgttctttctggaaatcgacttacaacgttctggacagtaacgataaagagagatttaccatcacagaagacaacgcatggacaaagtttctggacggaatggtgagcgaaatccctgtgatcggaatgtttaccggatatttcttaaatccttcctacaccgtagccggaatagacggaaaagcatattttaaactgaaaaaaatgccgtctttcttcggaagaagatttcaactggacagactggttgatattgatgacgaagaagaaagcctggtcattctttcattgcttatgatgacgctgcttgaaagagcgagaggataactaaattaaactaaaaatgaaatatgtaatcattttcttttcggctttccttttgattgcctgcaaaaaggataaagaaacagtttccgatctggcaaaaaaagattctgtaactgtggctcaggattctgtaacaacagatacacagaaaacagatattaccattgatacatttccttttccgaaagaaattaaggaatgttcttgctattttgccaaaagcaagtcggattttgaaaacgaaaaatatatttatgcagatgatgccggaaaaacagcctacatgaagctggacggaaaaagactcgccatgaatctgatctcttcaagcgatatggaagtagacgaagaactaagcaaagaaattgaaagcaacgactataaaatctcggtaaaaggtaaaaaaataaaaggagaagaagctttactttttgaaggtacgcttactattgaaaaaccggacggaacggttgttaccttacctgtttacggggaatgcggatgctgaaaatacatttaaaacaataaaaaagaatgcttctgaatgatcggaagcattttttatttcgtaattttgataaaaataaatttcatggagctatctaatatagaaccgcagattatctggaagaatttctccaaattgaatgcggttccgagaccctcaaaaaaagaagaaaaagtaattgcgttcatcagagaattcggtgaaaacttaggattggaaactacggtagatgaagtaggaaacgtgatcattaaaaaaccggcaactgcaggaatggaaaaccgtaaatctgtggttttgcaatcgcatctggatatggtttgccaaaaaaacaatgatgtaaattttgattttgaaacagaaggaatcaaaatggaaatcgatggagactgggtaaaagcaaaaggaaccactctgggagccgacaatggtttaggagtagcaacaatcatgtctattctggaaagttcagatattccgcaccctgctttggaggcacttttcactattgatgaagaaacaggaatgacaggagctttaggtctgaaaccgggacagttaaccggagatatccttctgaatcttgataccgaagaagatgacgaaatcgatatcggttgcgccggaggaattgatgttactatttctcaaaactacgaaactgaagacgcaaaaggacaaatcgtgagatttgaagtgaaaggacttcaaggcggtcattccggaatggatattcacaaaggcttcggaaatgcaaatgtgattttgggaagacttctttataaggctttggaaaaagaaaacattcagctgatttctattgacggaggcggattgagaaatgcaattcctagagaagccgttgccgttgcttccgtaagaaatgctcaggaatttatcgaagaagtgacaaatggtcttaaaaaagaaattttagacgagtttgcaagcattgaagccggtcttcagatcaatatcgaaaacacaaccacttcagagaaagcgatttcggaagcagattccagaaagattattttaacattgaaatctcttcataacggagtgtacagaatgagtccggatgtaaaagatctggtagaatcttccaacaacgtcgcaagagttgaattaaaagacggtgcattaaaaattttaaacctttcaagatcatccgtagaatcatctaaagattcagtggctgaacagttaaaatcggttgctgaacttgccggaatgaataccgttttcagtggttcttatccgggatggaaaccaaaaccgggttctgaaatcgttcaactaatggaaaagatctacgtggagaaattcagtgaaaagcctcacgtggtagcctgtcacgcaggtctggaatgcggaatcatcggagccaattatcctgaaatggaaatggtaagtttcggaccgaccattcgcggcgcgcactctccggatgaaaaggcaaatattccttcggcacagaaattctggagtttcctgaaagatattttagcgaatattcctcagaaataaaattgtaaaattgctatattgaatatccaaagtctttttgattttggatatttttgtttttgatataaaattttattgaatatccgttaaacaacttattactatgcactgatatgaaaatcaattatttataacaggcacttcgacaagctcagtgtgacacctctaatactaaacgcttgatttctagcgatgtcaagctgagcctgtcgaagcatctaagcgataaaacaaaaaaaataaacaatgaaaagcatcacggtattctgcggatcaagttttggttcagatgatatttataaggaacaggctactttactcggacagactttagcaaaacaaaatattcaattggtttatggtggagcagatgtaggattaatgggcgctgttgcagacggagcactgaatgaaggcggaaaagtaaccggcgtccttccccgctttttacagtccaaagaaattgcccacaaacaattgacagaattaattctggtggaaaccatgcatgagcgaaaaaccaaaatgaatgaactttgcgacggcgttattgttcttccgggaggttacggaacaatggaagaattttttgaaatgataacctgggcgtaacttgggcttcacaaaaagccaatcgctattttaaatattgacggtttttatgatgatttgattaagttggttcaaacaatggttgataaaggatttttaaagcaaatcaatcgagatatgttgttaattaatgatgatattgataaattgttggagatgatgaaaaattatgaagctcctgcagttggaaagtggatttctaaagatgaagtttaaaactacaccgtttatctaaaaatcactaaatttgattttaaaatattaaaaattatgaatttagaagcacgtaaaatatcgcttgttcaggaatttttaaggattgataatgaaaaaatcatcagtactttggaaaatgttcttcacaggattaaatctgaaaattttgagaacaatctaaaaccaatgtctttagaacagtttaataatgaaatagataaagcaattggtgatgaaactaacgatagaattattaatataaaggacttaaaaaataaaatccaaaaatgggattagaaattttttggtcacaatttgcagaagataaactgtatgatatttttcaatattacaaattcaaagcagggcttaaagttgcaaagaaaattattaatgaaattattgataaaactttaattttagaacataatagtaaagcaggacaaattgaagaatttttggttgaaagaaaacaggaatttagatatcttatttccggaaactataaaatcatttactatatcaataccgaaacaaataaaattattgttgccaatgtctttgattcaaggcagaatccgtcaaaattagaggaaacaaaataatttcagctacaaaaaccaaaacctcccgaagaaaatcttcgggaggctttgtttatggttagttaaaatctttctaaggataaggagcgatctccacttccagaccttccatttcaggaacgatatgcagttgacatcccagtctgctgttctcctgtacatggaaagcttcacccaacatggcattttcttctgcgcccatttcgtccaatcccggatcgttggttacataaacctgacatgaagcacacatagccattcctccgcaaactccgatggttccttcttccgccagttcataagaacggatgatttccatcagattcatagacatatccgttggtgcaataacatcgtgcgtaacgccttccctatcggtaatttttatattaatatcgctcatcttttgttgatcgttaatagttgattgttgatgtaattgatattcaacaacagacaacaaaattagtcaatttttttcacaactgccttttcagcctcttttctgcttccgtcgaatccgtctacgccgcttacggttgtatatttcagaacgaattttttacccggattcagtctgttgtaaacactctgacacattaaagtagcttcatggaatccgcaaagaatcagctttaattttcccggataagtattgatatccccgatcgcgtaaattccgtcgatgttcgtctgataatccaaagcattgtttacaacgattgcatttttctcgatattcagtccccagtttccgatttctcccaattttggtgttaaaccgaataacggaataaaataatctgtctcaatatcgtaaggatcctgtccgtcaattgccactgtaatcgcttctacttttccgtcacctttaattgctgtaacttctgcaggagtaattaatttaattttaccctgatttttaagatcctgaactttttctacagaatccagagcgccacggaattcgtttcttctgtggatcaacgtaacttcactcgctacattagataagaaaatactccagtccagtgcagaatctcctcctcctgcaatcactacttttttatttctgaaatgttcaggctcttttacgaaatattcaagacctttttcttcgtaatcggctacgttttcaatggtaggttttcttggctcgaaagttcctaaacctcctgcaatagcaatcgctttcgctctgtgaaccgttcctttgttcgtaatgacttcaaaccattcgtcatccacttttgtgtaagaaactgcagtctctcccaaagtgaatcctggctgaaactgcttgatctgctccattaaattatccacaagctctcccgcatttatagaaggatatcccggaatatcgaaaataggctttttaggataaagctcagccaactgtcctcccggttgaggaagtgcatcaataatatggcacttcatttttaataaacctgcttcaaatacagcaaaaagtcctgtaggaccggctcctatgatcaatatatccgtcgttatcataattataagataatttaattatacttgtgatcgcaaatttactaattttaatgcgaagcatatttaattcagtctaaataaaaaactgagatttgtcaaatatatttcatattttaaagttattgaatttggcaatgtttttgtaaaatttaaattatgaagaaatttttaagtattatttcgatatttatattcattctgggatttggacagattgataatattgcagacggagagtctattacgctgagaatccattacggatttctgaatgcgggtaccgctaatcttacggcacagaaaaccaccttcaaaggagctccgcatcttcatgtaagaggaacgggacagacaactggagcagtaagagcgttttttaaggtagaagatttttatgaaagctatattaatatgcagactgaacttccgagcttttatgtaagaaacgtgcgggaaggaagctacagacagcatctggaaacaaccttcaaccacgacaacaatacattggttttaacggacaagaaaacgccggcaaacggatcgaaagtaataaaatctgtaaaaggagttcaggatatgctttcgtgcttttattatttaagaagtaaaactgccgctgaactgaaaaccggaacagtaatcaacatgaatgtctggattgatgatgaaatgtttcctttccagctaaaagtggtgggaactgaaaatctggataccaaattcgggacaattaactgtttaaagattattccgtctgtgaagagcggaagggtttttaaagaaaaagaaggagtaacgatgtgggtttccaacgacgccaatcatattcctattttattgaaagctgaattggcagtcggatcattaaaagcgagtatcgacggatataaaaatgtaaaatatcctttaaagtttacaaaataaattctttgtaaatcattagaaataagatgtctgcaaattttgcagacattttttgttttgtgatgtaatagatttcagatttcggttgtcttctttaaaacattaagaactgaactatgaaaactcagatcctggcaatttgccttactttatcttccctactcacctattctcagaaaaaggaagatgcgcagattgtcagaaaaaacatcgtcattacaaaaacctcatcatctcccaaaatagacggaattctggatgatgcagaatggcggaaggctcctgttgctaccagttttatagaaagacagcccaacaacggaaaacttcaggcagattctgtaagaacggaagtcagaattttatatgatgatacaggaatttacttcggagcgcagatgtacgatcctactccccataaaattgccaaagaactcacagaaagagacggcgtaggaaatgatgattttttcggaattactttaaacggatacaacgacaaacagcagagtctggaatttatggtaaccgcagccggcgttcagtttgatgcaaaaatcacgacggacggcgaagatgacacatggaattccatctggtacagcggggcaaaaatcaatgaaaaaggatgggcggtagaaattaaaatcccttattctgaactgagatttccaaaaagtaatgttcaggaatggggaatgaatatgttccgcaggattcagcgtacaaaaactacttatgactggaattttgtggataatgcaaaaaactcttatacattatttgatggtgttttaaacggaattgaaaatatcaatcctccgacacgattgtctttcacgccttatttttccacgtacgtcaacagtttcgacggaaaaactactgccaatgtgaatggcggaatggatgtaaaatatgggattaatgacgcctttacatttgatatgactttgattcctgatttcggacaggcaaattttgataattcgattttaaatttaaccccatttgaacagcagttttccgagcagagaacattcttcaccgaaggaaccgaattattcagtaaaggcggaatgttttattcaagaagagtcggcggagaaccttcgagatatcctgcaaccaatgacaatgaagaggtaacggaatatccttcaaaggtaaaattattcaatgcttttaaaatttcgggaagaacaaaaaaaggattgggaatcggtttttttaacggaataacgcaaaaaatggaagctacgatattaaaccatgaaaccggggaagtgagaagagaggtggtagaaccgtggacgaattacaatgttctggtttttgatcagcgatttaacggaaattcttctgtctctttggtgaataccaacgttacccgaaacggagatttccgcgatgccaatgcaacgggaattctctgggatatcaacaacaaaaaaaatacttacaatactttcggaagtttaaaaggaagctgggtgatggatggtgaaacgaaattcgggactaaaggtgagcttggctttgcaaaaatttcagggaaaaaccgttttagtatcaacggaaatgtcactacaaaagactgggacatcaacgatgtaggattttctacaagaaccaatttcggaaattacaacgcgtggtacggttacagaattttgcagcctacaaaaacattcaataatatgtatctgaattttaatctgaattattttcacagattagaaccttttatttttcagaatctgatttttaataacaataacagttttacggataaaaacttcagggttttcgggggaggaatagagtttacaccttttacccagaatgatatttacgagccgagaacttttggaagacatcttcaggttcctaaatattttgattcctggatctggtttgaaagcgacagccgaaagaaattacagcttaatttcagtttcgattattatgcgtatgatgaaaaaggcagaaatcaggttcttaccaatttcggacttcgttaccgtttttcagacaaatttaatgtaaactggagctttaatccgagcttcagcaataatgaaacaggttttgcagggaaaaacagctctgatattttcatcggaagaagacagcgaaatacctacgaaaatgcactgacttcaaagtatacttttaatgaaaaaatggctcttacattaactttcagacattatttttcggatgttacctacaaacagttttacacgctgaatcaggacggaagtcttgcagaaaccaatgcttttgacaaaaacctgaacggaacctataatgcatggaatgtggatttaagattttcgtggtggtttgctccgggaagccagcttactttattatacaggaatgccacttccaattatcttgaattttcaaggctgaatgtgaagagaaactatgatatgcttttcagcgaacctactgtaaataatatttctctaaagttaacgtactttctggattataacaggataaaaaactggacgaagaagaaaggttaatcgttgatttaacagaaccgttgtatattttcaatagaatcttgtttttaattacgttttgtttcttaggtcagtaattaaaaacgtcaagcctccgaaatttcggaggcttgattttcattgtgtgtgtttttttaggctgctttctaacctttgctaccctttttttagtatctgttacagagcattgctgctctgcaatcacgatacaaatatcatttgtgtcttagtatctctgattctgaaataattttttttcatcatttgtgttttcagaatcaaaaatcacttttaattatcggttaataattgtttgcttttgttgatacaaatgtaggcacattgtggtatataattctaataaatcctttagatatatatcgctaagcttgtagatatttatctacaacgataattaattcaatactttagcgaaaaagcaatcattttaataaaaaaaatcacgaaatattattatttcatgatctcaatttcaaaatgtattttaaagtttagtaatgatttttcatcacttcaataagttctacaatattttcgatgttaagtttatcgaaaattcttttcttaagtgtacttaccgtattctgtttaatatcaagccggttggcaatttcaagatttccaagaccttccgcgtacatttccgcaatctggagttctctttccgttaaagacaataaaggattaatgagtgtaggattgtttatggaattcctcaataacgcctgtgtaacctcagaaatataacttccatggctgtacattctctttattgcttctgcaatttcctcttcttcgctcagtttgcttagaaatccgtctgctcccgcatttaagaattttaaagaatgggcgctttcttcaattcctgtaaaaataaggatcttggttttcggacttatttttttaatttccggcacaatggtaatgctgtttccatcgggaaaatgagcgtctataattgcaatatccaccggttgttcctgtatagaattcataagctgctgcaaattggaagcgtgaaaaatctcactctcccaatccatatcttccagaagaaaaacaattccctgtcttatcagactatgatcatctgcaagcaaaaacctcacagctcccgattttatttcactcatttactgatgtttaaattaacagaaaaatgtacggtagtcccttttccttcctcgctggaaaccgaaatatcgccatcatacaaaccaatgatttctttacataaactcaatcccaatcctgctccgagattttccacatcttccgataaaactccctgataataaggttcgaatatcttttcaagatcagatttggaaattccgacaccggtatcgctgatttctgtaatcaaagatattatattttcgtcaacaggctgcgtttttgtgatgacttttatctgtccgttttcagtaaatttattagcatttcccagaatattcatgaaaatctggttgatttttttattatctgaataaacgttgatgttctggttaatattttcatcaacaataaattgattatttcttgtttctatataaggttcaatagaagtaagaatggaagtgatctcgttcttaagattaaatttcaccggaataagtttattttcaaccgcctgatttttcgtgtattccaaaatctggttcgcctgcatcagcagagaatcattggtaaaactgatggatttcagatactctttcaccttttcgtcttctgttcttttattgattctgttgatgaataaccctataattttcagaggcgatctcagttcgtgactcagcattcccaaaattctgtttttgaaattcaggttttcactgatctgcttattggcagcattcagttttttctcataaataaatgcaattctggtcaggaacataatcaaaacggaaacaatgaacatcagaatcatcgcaccgaataccagattttttctaattctgttgctttctgaattctgcttctgatattctttttccagttcagcttttgaatccttaatggcaacttcgtagatattcattaaaccattgctgtaaacgagaagattattaaaaattttatagaaattaccgctgttgttctggtttctcaccacatttacctgaatcttcttaatttcacctttataatgattgttaacttcattaaaaatactgtcgaattcagccttaatattggcgggattgggttcctttccctgttttaccgtgataattgtactttccttccgtacattttcttttccggaaatagcatctcccaaacgtccgaaaagtccttttttctttactgtatcggagattatttttgtttctactttaaatttatcgaaatcgtagttgacgctgtatttctccagtttcggaaggctgttttctactttgaagttcgattttgtagaatattcgtaggtagagtctatcagagatttcagcttttttatctccatagaatcttttttcttggaggttaacacgtttttaagcttcggatatttgttttcgtaatgtccgatactgtcgagatttttacccagtttattaagagaagtaaaataagaatcgagataggtattatcattactcatcatatatttctgaagaaaactctgtgcattcaggagttctccgcgggaattgtccgtaagattttccagcgtatgaacttctttaagctgattttcaaaaaaggttaaatttttcctcgaaataaattcattatagaaaaaaccggcaataagaagctgaatgagcagaatacaaacgagcaatgagtaatggataatttttctcgctttaaaattcaataattttttggacattttgtgtaagttattagtaagtgtgtttttgtttattttttaacagtaaagaaatagatccatttgttaaaactttctgtaaaaattgaaaattttaaacaagtttaccataaaaatagtaaaaaatcctgtaaattgaatttttacaggatttaaatttatttagactttacgaattataaagttttgaattgctctaatgttctgatatcattttcaaagaacattctgatgtcgctcatctgataaagaagcattacaattctttcaattcccatcccgaaagcataacctgaatatttttccggatcaatgtttacattctttaaaacggcaggatccaccattccgcatcccatgatttccagccatcctgttcctttcgtgatcctgtaatctgtttctgagtttaatccccaatacacatcaatttctgcgcttggttccgtaaaagggaaataagaaggtctgagtctgatttttgattttccgaaaagttcagtcgtaaagaactgaatggtctgctttaaatctgcaaagcttacattttcatcaatatataaaccttcaatctggtggaaaatacagtgagaacgtgaagaaaccgcttcgtttctgaacactcgtcccggcgataaaatcctgatcggcggctgattttcttccatataacggatctgtacggaagaagtatgcgttcttaataaaatatccggattctgctcgatgaagaaagtatcctgcatatctctcgccggatggtattccggaagattcagtgccgtgaagttatgccagtcgtcctcgatttcaggaccgtctgccacagcaaaaccgatagatttaaaaatctcgatgatcctgtttttcactaaattgatcgggtgtcttgatcccagatccaaaggaaacgcaggtcttgtaaggtcttctttttctacgataatagaagatgcggaagcattttttaaatcttccagttttacgttaacagcctgcttcagggtattgatcttctgtccgaaatctttcttctgatcgttgggaacttctttgaatttttcaaaaaaatcattcagaattccttttttaccattgtacttgattcggaagttttcgatctcctccttagatgtagcattaaagccgtttacctcaacgagtaattcttctatcttttctatcattgttttaccctttcaaaatgttttgcaaaaatacggtttttcagttgaataattttcttaaaaatgttaaaaaaaatctgcctcttttggggaggcagacttcaatcacttatttcacttaaataaaaaaattattttttttctaaagctttcacgttgatctgaagagttacctcatcttttatcacgccattttcggcgggagcctgaaatttcaccccaaactcttctctcataatgtctttcggctcggtagcaatatttaccagaccttccttcacggaaacattggctttaaactgaaccggttttgtaattcctttaatggttaaattcccatccagtaaagtattataatctccctcggatgatggggttactttagtaatttcatacgaagccgtgggaaatttttctacctcgaaaaaatctccgcttttcagatgtccgttaagtttgttgagattttcagtatcgtttttcagatcttcagaagttaaggaagccatatctgccacaaattttccgctctccagctttccttcttttacagtaacatcgccactttcaaatttaatagtaccgaaatggcttgtgttttcagatttaaaaattttatatcccttccactccactctgctgttaagggtatccacaacatattgtaccccatcttttgtagttgccacttcattgctatcgctggtaagaggcttttcctttttacaggaaaccactgcagctaacgcgaaaaatgcaggaataaccagcgaaaacagctttttcttcatgatttataaatttttattactcccgctaaaataataaaaaatattgttctttcctaaaaacatttcaattcattacttttgtagtatgctattagaaataaatcatttaaacttttcctattctaaagaaaaacctttgtttcagaaccttaatctgggctttgaggaaggtaaaattattgcgcttgccggagaaagcggctgcggaaaatctactttactaagcctgatttatggtttgctggactgggaaagcggtgatattatttttgacggtaaaaagttactgggaccgaagggaaatctggttccgggagaagccgagatgaaattcgttgcccagaattttgatctgatgccttatgcaacggttgctgaaaatgtaggaaaatttatttcgaatattaatctcgcaaaaaaaagggaaacggttgctgaacttctggaagttgtcgggttagaagaatttgctcctattttacctaaatatctgagtggcggacaacaacaaagagttgccatcgcaagagcactttctgtacttccgaagcttctgatccttgatgaacctttcagcaatctggattttccgagaaagattgaactgagggaaaaacttttccggtatgtaaagcagaataatatttctctggtaatttccacgcacgaacttcaggatattattccgtggctggatgaaattatcgtgctgcaaaacggaaaaatagtacagaaaggtaatccggaaacagcttttaaaaatccttataattcttacgttgcgaaacttttcggggaagtgaatattttcagtgaaagtgaaatgcaggattttcagatttcaaaattttcttattatccgaaagaaataaaaatctctgaaagcggttttgaggcggaagttctggaaagccgtttcgcaggaaatcattactggaataaagtaaaggcaaaaaataaagaaattattctgtattctgatgaaaagctgaacggaactatcgctgtttcatttggttaaattctgatgaatatttctaacgaagctgaaaatcatagcccagattaagcggcgtgtctgagctcttttcgttggtttcggcggctgcttcgcagccgccgaaaccaacgaaaaagcgagtagcgaaagctggaaaaagctcctaaaaactttataatcatcacattttacacaacttaccgtggatttgtggataaaaaaatatacaaacataagaatcaggtttaaaactttttcttacatttgtatatcaacagcataaggaaatttttggttaatactctttctgcctcctgagacgaaatccgtttattctagacaaacaatgccgtctcttgaaagattaccctgtccaattctttcctttttttattgctttattttcctcttctgatagaaaaatcctaaaaattaagcctttttcacaaattcagatttcagtgccatagaaccgaaaccatcgattttacagtcgatattatgatcgctgtccggtctcagacggatatttttaacttttgttccagcttttacaggttttggagctccttttacgggaagatctttaataaccaccacagaatctccatcctgaagttcgtttccgttagaatctaagattttccctgaatttgatgcatctgcgctttcttcttcgggattccattcgtagaaacactgggaacaaaccatcatattatcgctcggataagtaaactcggagctgcatttcggacaaagtacagtatcactcatatttttaattttttgcaaagttaattttttaatatcttcaattaaaatttaataacatgagatatacacgtagatttttaatttttatttctttagtcctgtttttcaggttatttgttcagatatttaatgaggttgacttaattcctaattacacaatgacgtttgttaatgaagaaatttcccaagtcgaccattttcagaatttaaatgaatctaaagaatattcaaaatcccagatctacaaatatcagaaaatcaacaaagaaagatcagataaagccaattcgcagcttataatgatcgttgttttggttattattcagttgtttttctatttttccaacagtacaaaaaatccggaacagaatgagcaatacacagactaaaattttgaaacagaaattctcagcagaaattcgtacttttgcagattcaaaatagcagaacccaattttatggaattgatacacagaaacctggcaatcggaattcacgatgctttgcaggaaacatttttcgaaaaaaataaatacgccgataaagtaatcgaaagacttttgaaagcgaataaaaaatggggaagccaggacagagcagtggtttctgagattttctataacatcatccgttggaaaaaacgccttgaatattacatgggggaaggcgtaaaacccaacaatatttataaattaatcattgcttatcttctttggagcaaaacgaactataaaaaatttgaagaatttgacggtataaaaatcgccgacattcttaccaagcttaaaaaaggaaccgttcctacgaaagcgatcgagcattctattccggaatggcttgctgaaactttagaaaaagaactgggtgaaaagtgggaaaaagaaatgtatgccctgaatgaacaggctccgacggttttaagagcaaattctctgagaacaacaacaaaagagcttatctctgatctttctgatgaaaacatcgtttcttatcctattaaaaattatccggatgcagtacaattggaggaaaaaaagaatgttttccttaccactgcttttaaagaaggtttatttgaagttcaggatgcttcttcccaaaaaatcgggtatttccttgatgtaaaggaaggacagagagttgttgatgcttgtgcaggtgcaggaggaaaaacgcttcacttagccgctttgatgcagaataaaggacagatcatcgcactggatattttcgaatggaaacttgccgaactgaaaagacgtgcaaaaagagccggagcgcacaacattgaaacccgtatgatttctgataataaagtaattaaaaggcttcatgaaaaagcagaccgattattgatcgatgctccgtgttcaggtttgggcgttttaaaaagaaatccggacagcaaatggaaaatagatcaggcttttatcgacagaattaaaattgaacagcagcagattcttcaggattattctaaaatgcttaaaaaaggaggaaaaatggtttatgcaacgtgttctattctaccttctgaaaataatttgcaggttgatgaattcatcagaaacaatccgaactttaaaatgattaaagacgaaaaagtaatgccaagtgaaggctatgacggattctatatggctttaattgaaagagtttcttaaaaaacattctttatataatgaacaaaactactcttttcagggtagtttttttgttacatttatatttcgtaatctttatatcttcttttcttattttttaatttgatatctgatattagtcatactgctttttaacgcaaaggatcgctaagattcttttatataccaactgtttttaagttcgcaaaggcgtgtcactcagcaaagagctcaaagatttccaacaagataaattacaggcaactattttctaacaatataaaaatgaatttctaaataatatctattcagttaacaattatctttgctaaaaccatttcaaattatgcatctaagaattttagtaagcttctttacttttttatgctgtttatcttttgcacagacgtacgaagtacagtacctcagttcatccaacggaaaagttttaacggaacagtctcccactttagtctgggcaaatgaaaaggaaaattttatcctgaataacaaaatcagagaacaaaaagcagattttcctttcgaaattacgaaaattgaaaaaccttcgaatacggtaatttcttatgcgtttttaaaatctgacgaaattatttcaacttcagataaagagtctgtggcaaaacagacttttgaatttaccaatgaaaccaagaaaattttgggatacacttgcaaaaaagcagttaccaaaatcaattccaataccattgaagtctggtatacctacgatctgaaaattcagggaggaccttctgtaatcgggcaaaatctgggttttgttctggaaattgaaagaaataaaaactctctgatcaccgctcaatcgattaaaaaagttaagaaaactgacattgatgctcttctgaaaggatcgattaattcaaccgatcagttaggttacagagatcttttgtggaaaagcagattcactaccctaaaagtttttgatcatgaaaccattaatttttcagatcaatctaaatctgacgaaaacataaaaagattcgctaacggaaccattattatgaaaaaaattaagttccctaaaatttccgagggcgaaaatatttttgttgaattaaaacaacaatccaacggcgatgcgtacgacagaaccggaaccgtattttttgtaccgcaggacaaatctcagtcgtttttcgacggactggaaaaaggcgtaaaaacacttccggtatatgaaaacggaaacggaaaacaatattacggaattacagcaacggaaaattacactcctgcggtagaaatgatgcgatttttcaccgctttcggaatcaataagttcaatcatattcagttaaaagataaaaactggcaaaccatcagtccttaccgtgaagatattacagatctgaaaccttccctttctgaaaaggaattatggatcggaacattcatcggaaattacgataaaggcggtcataaagtcagtttggaaatcaccattcacaaaagcgatcagaccatctataaaaacaatacggttattcctttattcaatactttaaacattatggaaatggcgggacaggattattctaccatgtttaataatgataaaggactgtttgtagagtttactttaaaaaaggatttgaaaaatgcccagttgaaatatacaacaaccggtcacggaggctgggaaaacggcgatgaatttgtaccaaaacccaactcgatctttttagacggaaaaataacctattcttttgtgccgtggagaaccgactgcggatcttatcgtctttataatccggcttcaggaaattttccggacgggctttcatcatccgatctcagcagatcaaactggtgtcccggaaccgttaccaatcccaactttatacagcttggagatttaaaagccggaaaacataccattcaggtaaaaatttcgcaaggtccgactgaaggaacgagcttcagttcatggaatgtttcgggagttctgttagggtctcaataaaacaaaaccttctcgcaaactgaattgcaagaaggtaaaaacacaaatgatgaaaaaaaattatttcgagccacaaagtaagggttaaaatttgtagaataaattaccatacattaagaaatatctcataataatttcgtatgtaatgaataaattagagatgtgagttaaaaaaatcaactaaaatcatattttcaatttaaaataattaaatttttacttcattttaaattaattaattaaaaatattaacttatttaatttttttgttgttatttttaaaccactattctacttttgtttcaaattaaatgaaaaaaaaatgtgtggaattgtatgtttgtttgacgccaaacaaaaaaccgaaatattaagacctcaggttcttgaaatgtctaaaaaaattcgtcaccgcggtccggactggagcggagtgtttcagaatgacaaagtagttttctctcatgaaagacttgccatcgtggatcctacctccggaaaacagccattatttaccaaagacggaaaaatagttcttgccgtgaacggtgaaatctacaatcacagagaactgaaagaagaatttcctgattatgaatttcagacacagtcagactgtgaggttattttagctttatatcaaaaatacggaaaagattttgttgaaaaattaaatggaatttttgccttttctttatatgacacagaaaatgatgtgtatctcattgcacgcgatcacatgggaatctgtcctctatatcacggttgggataaaaacggaaactattacgttgcttcagaactaaaagcgctggaaggagtttgcaaaaccattgaaacttttttaccgggacatttggtgtacagcaaagacggaagcgaacttcagcagtggtataaaagagattgggaaagttttgatgccgtaaaagataacaaaacggatattgagaaattaagaaaaggactggaagatgcggttcacaggcaattgatgagcgacgttccttacggagttttgctttcaggtggattagattcttccgtaatttctgcgattacggcaaaatttgcaagacagagagtggaaagcggagatacacaggaagcgtggtatccgagattgcacagttttgcagttggtttggtaggatcgccggatttggcagcagctcagaaagcagcagaacacatcggttcggttcaccatgaagttaattttaccgttcaggaaggtctggatgcggttcgtgatgttatttatcatctggaaacgtatgatgtaacgacagtgagagcttctacgccgatgtatcttctggctagagtgattaaatcgatgggaattaaaatggtgctttccggagaaggttctgatgaattgttcggtggttatttatacttccataaagctccgaatgcgaaagaattccatgatgaaacggtaagaaaattaggaaaacttcacctgtacgattgtttaagagccaacaaagcgttgatgagttggggaattgaaggtcgtgttcctttcttagacaaagaatttatggatattgccatgactgtgaatccgaaagataaaatggtaaatgctgccgaaggaaaaattgaaaagtgggttctgagaaaagctttcgaagatattcttccggaatctattgtatggagacagaaagagcagttttcagatggagtcggttattcatggatcgatactttaaaagcggttgctgaaaaagaagtaacggatgaaatgatggcaaatgcaaaattcagatttcctttaaatacgcctcaaaacaaggaagaataccgttacagaacaatttttgaagagcatttcccaagtgaaactgcggctgcaacagttccttcggttccttcggttgcgtgttctacgccaattgcactggaatgggatgaagcattcaaaaacatgaacgatccgagcggaagagcggtaaaagtgcatgaaacttcttacggtgagtagattcagaagtatgagaatgtgagcgttttttgagtttatgagattttttttattcttccctatttttggttaacaaatagaagatgagcattctgaaacgaaatcctgaactctaaaaatctaaaccttacataaaaatttatcaatcctgtagcaatacaggattttcttttgcatttacatcaataatattgtcagaatttaaccgttaatcaaatatattatctaataaataattatatttggaaaacgaaaatatcaattataaaaaaatgagaagaaacattactatcttatttgctttattatccatgacttttgctttcggacagggaaaatatggtaaatatcttagctcaaaaaaactggcaatggtgtataaaagtgtgaaagatggcgataaagacgacttctaccaacaatattactggctggtaaaagcggaacagctgaaaacatatcctcaccttaaagatataaaaccgaaagttttatatgaatttgtaaaaaaagtgaatcctcagaatccgactaaaaaactggatgcaagaggtaaagaacttagagaaaccgcagaattatctttaaaccagtatttcaaaaacaaaaatctggataacaattctgttttaatgtacaatctggaaacgtatgtagatccttctaaaggacagtattatacaaaagttgatgcagaaaaaattaaggaactggttccgaaagagctttatgctttcaactccaacaatagaaatacaggagaagataagacgtattatctttggattaataaagaaaaagatgatttcaatatcgtagacatcattcctgaagagaaagaaaataaagcgttctatgcgagagtgaagcagtatcttccaagctataaattctcaaaatatgttccttctgtgaaaaaaggtacaaaaacggacagaacagatgcagatttctactacatcatgccgtttgagcaaaacacagataacatcgaatacaaaacaaaagatttcaaaactttcgaattaagccagtacagaaaagccggcgaagaatggaaaggggttgaaaaaccaagaaaataaattaaaaagtcctgtgaagtttcgcaggacttttttattggaatattttttaatacaaatggcacaaatttttgcacgaatattcacaattgatcgtaaaatttaagaaaatagaatattataaatgtcgttattgataacatcatcaaaaactaaaacagctaacagttcaggagtatcaggaaaaatattgcggcaaatagatttctccttcgtggaaataatagcttaatccatcaattaacatcttctctttattaaaaggaataaaaattgctctgaaaattacattctcatttttttttgaaccaaacaaatctggaagcttttccagtaaaaatacatgtcagaaacactttcgcagcctcaaaattcagttaaaaaaattctgccgctgattcttgcaacggctatcttcatgcagatgctggattccactattctgaatacttccctgccttccatcgcaaaagatcttcaggaatctccgctgaatatgcagaacgccatcatcagttatgtacttacattagctgtttttatgccggcaagcggatttctggcagaccgcttcggaaccaaaaaagtattcatattttccctgattcttttcagtttggggtctcttttctgtgccatgtctcaaaatcttacacagctcgttatttcccgtgttattcagggtattggaggaagtttgatgacgcctgtcggaaaattagctttaattaaaactttcgataaaagcgaattattaaaggcgatgaactttgccattattcctgcactgatcggtcccgttctcggtcctttggtgggaggttatatggtagattatctttcgtggcactggatttttttaattaacatcccgatcggaattctgggaattgttttaggcataaagttcatgcccaactacacatccaaagacgttgattttgatctgaaaggatttttgatctttgcagcagcctctctcctgctttccattgctttggaacttttcggagatatgcagaatacaacaccggttctggtcattttcattctaggatttctttgtctttattactactacagacacgccaaacgtgatgaaagccctatttttcctttaaatttgtttcaggtaagaactttcagagtcggaattgtcggaaatcttgccaccagattaggaatcagctctgtcccgttgcttttaccgctgatgattcagattgcgtacaaacaatcggcggtaacttccggctggatcatcgctccgatggctttaactgcaatgttcggaaaatcgtatgtgataaaaatcttagaccgttttggttaccgacagactttaatgacgaatacttttattatcggaacgctgatctgtcttttggcgattcccgatatcaacacctcattgtattggtttattcctattatttccattttaggattctttaattccatccagtttacttcgatgaataccatttctattgcagatcttcgaaattttcagaccagcagcggaaattcacttatatccgtcaatcaacagcttgccatcggattcggaattgctttcggattaattgtgcttaaaattttcgaaaatactgatcttatccacggagaaatccacaacgctttccgatttacttttcttactgtcggaattctcacgatcatttccggatttattttccgcaggcttcatatttcggatgggaaaaatatgaaatcgaaagaggattgataaaacaaaccgatttgtcaatttcctaatttaggcaaagaaaaaatcaattgttcattgagttcaggagttttttgcagctttcgctactcgctttttgaggattcggcggctgcttcgcagccgccgaatcctcaaaaagagctcagacatcccactcaatgagctctgaaattacggaaaacatttattcaacaggaaatttcagctttagttctgaaaccaccccgtcaaaaatttctccaaaattttcgccacccctccaaaggaggggaattttttaaatcccaaataaaaaactgaaaacatccgctcagcgcaatcatcaatcatcaatcatcaatcatcaatcatcaatcatcaatcaatcccccttattaacacagatcaatgtacaggatttttgtttaaaatacctttgcttcataatacaaccatattatggcaactaaaaaaatagaaaagatagtatctccgaaacctgcgcattttgtgggcgacggttttagggttcataattttattccgggcgttcagggaatggatatgaaaaggatggatccgtttattatgctcgattacaattcaaaatttcactttaacggaacagatcagcctcgaggagtgggcgttcatccgcaccgaggttttgagactgtaaccatagcgtataaaggaaaagtgcagcaccatgacagcgcaggaggtggcggaattatcggtgaaggcgatgtacagtggatgactgccgcaaaaggtattcttcacaaagaatatcacgaaaaaaaatgggcaaaagatggcggaattttccagatggttcagctttgggtaaatcttccgtcggtttataaaatgagctgtccgaaatatcaggcaattaaaaattcagatatgacgaaagtggatcttggagaaaacggacatattgaagtgattgccggagaatatcaaaatcagaaaggtcccgcttttaccttcagtccggttcacatgatgaatgcaaaactgaaaaatggtggaaaagcagcattcacctttcccgaaaatttcaatactgctgcattggtgattgaaggaagtattgtcattaataatgaagaaaaagcaccacttaatcatctcgttttgtttcaaaatgaaggagaagattttactgtagaagcaaaagaagactcaatcgttttaatcatcagcggaatgcctttaaatgagcctatctttcctcacggaccttttgtaatgaattccagagaagaaattatgcaggcttttgaagatttcaatttagggagattcggttatcttgcagattaattttaattaaaaatcatcatcaagctgttctttttcttaattttatatatttagaaaatggttcggaaaataacctgataatttactaattatttcaagccattaaataaaacatggaaactaatacgattaaagaactgagaaacagaataaacatacctttacattcagcccaaaaactcctgaagaaaaacaataatgatgtagaattaagcatacaggaatttcatcgcaacaaaattaatacgatatgcagattaactgaatgtgacgataaaactgcaaaaaaatattaccatatctgtaagcatgatgaagagaaagccatgaaaaaaattcaggaaaaaatcttatatcttacagcaacaccagatcagcaaattcataaaataggatttatactgtgggctgaaaatagcagtctggaaaaatattgcatcccaacagacaggggaatcttcattcaatctaaagatttcgattatgtaattgatatttttaaagctgccgattctgaaacgtttgacatcacaggtcataaccgatataaaaatgaaacgatgagaaaaattgtaaatcagatcgcaagattacctatagaaacagcggatgaagaattatttttacggaatctgattaaatggttcaattccaaactgagattcgcagaagaaatcgtagtttatgggaatctatagacattcaacctcaaaagtcctcctgtaaggattcaaagtaaaacaaaatttaatacaaataaatcacgcacatcatgtcaaacatcggacttattatagaagaaaaatctgcggacatcggaaactttctggtgggaagattattgcctttccgtgaaaaaagagcagtcggacctttcgtttttatcgatcatatgggaccatccgacttaaaagattatcagaatctggatgttccgccgcatccacacatcgggctttcaacattaacgtatcttctggaaggatctatttttcacagagacagcatcggaagtgctctggaaataaaaccgggagccgtaaactggatgactgccggaaaaggtgtggtacattccgaaagaactccggaatatctgagacattctgataaaagacttcacggattccagatctgggtgggacttccgaaacatctggaacagtctgaacccacattccaccacattgaagcagatgaaattccggtttgggaagaagacggaattcagtataaattaattgcaggagaagcttttgggaaaaaatcgccggttccggttcacagcaagctattttttattgaaattaaaaccaaagaagcaaaaaagatcagcataggaaaagatctttacggagaagctgccatgtatgttctggacggaactgtttctactgacggaaattcttacggatctaaacaactgatgattgccaaaaacacccaactctgcgaatttgacatgagcgaaaacggaacggtttatcttttcggtggcgaaccatttgaagaagagcggtttatattctggaattttgtaaattccgaaaaagaactgatcgatcaggcaaaagtgaattggcacgaccagaaccacgatgcttttcctttggttccgggagatgaaaacgaatatgtaccgcttccgaaagctattttaaacagaaaaccataacaatttaaaatcatacttgatgaaaatattagcatttgcaggaagtacgtcttccacttccatcaacagggaacttgtaaaattcgttctaaaagattttcaggatgaggaaatcaatctgattgatctgaatgattttgatatgcctgttttttccgtagaccgtgaaaagaaaggttttccggaagaagcacaccattttctgaaagcgatagaagaatgtgatgtgattatttgttcgcttgcggaacacaacagatcgtacagtgcggcttttaaaaacgttttcgactgggcttcaagaatcaacgtgaaggtttttcaggaaaaaccgatgtttctgatgtctacttctccgggaggttacggcggcggaaatgtgatgaatacagcaaaaatattttttccgaatttcggagcggatatcaaagaaactttttcgcttcctaaattttatgaaaattttgatttggaaagtggagtcatcaacccagaaatgctgaaagagctgaacagtaaagtggagaatttcaaaaatacgatccgcaaataatgaccaaaggaagattagaagccttcagtgacggggttcttgcgatcatcatcacgattatggtactggaactgaaagttccggaaggaaacgactggcaaagccttaaaccgcttattcctaaatttctggcgtatattttcagttttctgtatgtaggaatttactggaacaatcatcatcatctgtttcaggcagtgaaaaaagtaaacggaaaagttctctgggcaaatcttcatcttctgttctggctttctttaatgccttttgcaacagaatggatcggagaaactcatttcgccaaaaatccggtagccacttacggattcggactgggactttgtgcgattgcctatacgattctggaaaatgcgatcataaaatccgaaggggaaagctctaagctgaaacaggccattgcttcccgttttaaggaaaatgcatccatagtgctttatgtttcaggaattattgtttcatttatttatccttatattgcagtagcactatattatacggttgctttgctctggctgattccggacagacgaatagaaaaaactttaaacgaaaattgatatggaaacacacaaatatgtaaacggagagattaccgtgctttggcaacccaaaaagtgcatccacgccgccgtttgtgtaaaaacacttccgaaagtgtataacccgaaagaaagaccgtggctgaaacctgaaaatgcaaccgcagaagaacttaaaaaccagatcgacctgtgtccttcaggagcactgagttatcaattcaataccaaaaaataatggcaatcacagtaaaagcaagtctgggaacagaaaaatactacaccgaagttgttgcgggagaaaacacgctgattacagatgaacctgtagacaaaggcggcagaaataaaggcttcaatccttttgaaattcttgccacttccctagcaagctgcacagcggcaaccttgagaatgtacatcgaccgaaaagaatggaacgtcgaaaaaataaatgttgaagtggaactggaaaattttcctttaacgaaaagagccattttcaaaagagacatcagctttgaaggcacaaatcttgatgatgaacaactgaaaagacttcacgccatagcggatgcgtgtccgattcataaaattcttacaaacgatatagaaatattaaccaaattttcataatatgattgaagtaaaacaaaccaacgacccgaaacacggaaattttgaagcattcatagacggaaaccatgcaggattaatgacatacacctgggctggagaagaaagattcatcatcgatcacacagaagttgaagaagcatacaacggaaaaggcgttgggaaagaaatgcttcttgcggcagtagattttgcaagaaagaacggaaaaacgatcattccgctttgtccttttgccaaggctactttccagaagcatgaagaacttcaggatgttctggtaaataagacacaggcttagttttaggctaaggttgagattaagtttgagattaagtttgagcttctgagttatcagccttaacttcaacattacatataaaaccttccggaaatgtatccggaaggtttttctttttaggcagaacagaaaaaaactatatttgctaaaatttaaattaaagcatgaattccggaactgttcttttgctgtttgtttttgtctatttcatcggacttttggttatttcttattttacaagccgaaattctgataatcagtcgttttttatcgggaataaaaaaagtaaatggtggcttgttgctttcggaatgatcggaaccagcttaagcggggtaacatttatttccgttcccggaacagtcggaaaaatgacgggaactgaatacatctacggcggattcgaatattacatgatggtgatcggctttttcatcggatattttattgttgccgcaattcttcttccgctgtattataaaatgaacctcacctcgatttatacgtatttaggcaaaagattcaatgtcgaagcgcacaagattggctctatattttttattatttcaagggcaattggtgcaacggcaaggttatatttagtagtcaacgttcttcagattttccttctggaaggtttgggcgttcctttctgggttacggctttagttctgctgttaatggtgcttttatatacgtttgaaggcggtgtaaaaaccattgtaattaccgatactttgcagacttcattcatgattatcagtctcattgcgtgtatcatttatattttatcccatttaaatttgtctttaggcgaggcatatacaattttagaacagaaaaattatacccacttcatcaattttgatcctaattctaaaacattttttctgaaaacgattttagggggaattttcattacgattgcgatgacaggattagatcaggaaatgatgcagaaaaatatctcggtggataatcttaaaaactcaaagaaaaacatgctcactttcgcaggaacgctgctttttgtgaatctggcatttctgtttttaggaggtcttctttatctttttgctttgcagaacggcgcagaatatggaaaaatagacggagaaaccgttaccaacatcttcggtttcaaagactctgcgggtaacattaaaaatatcatgggagacgatttgtttcctgctttatcgcttcagggacatttcccgatgattatttccgttatcttcattatcggattgatttcggcattatttccttctgcggatggcgctttaactgctgttacaagttcatattgtgtagatcttttgaatcttaatgaagataaaaacaaaacggagaaagagaaaaaacaacttcgtatgaaggttcatttaacgtttacgatcattttctttattttgatcatggtctttaaagctttgaatgacaaatcgattgtttatctgatcatggagattgcaggatatacttacggaccgcttttaggacttttcgccttcggaattttcacaaagtttcagatttcaaagaaatattcaattttggcggtaacgattttagctccggttgcaacgtacattatcaattatctggtaacaacatatacggattacagaatcggggtagaattaattgttctgaacggtttattaactttcattggactttggatcgtaagacatagatcttatctgaaggttgtttaaaaaaaatcaatgttttaaacctgttgaaacaaatttaaaattaattttcagacgaatacagttctttttgtggttaataaaaagtgcagtatatataattattaaacgcaaagaaaccctgttatttttttaagaagttgagcaaagatatttccgtctgagacggatgatgaagtgttcgcttaatgacagatgaaatctgcttcactttgcttatcttaaaatattaactctgaaaataaagactttgcgtttgaaacttaaatttagatttctattaaaaactttaaacagacttctttttaaataataaaatctgcacttttcagcgcggattttgtatttccgtaagccattaaaaaattgtaaattcgcatacaaataaatcttatataatgagtaaaagtattgaagagttaaaatctcttactacacaaatcagaagagacattttaagaatggttcatgctgtaaattccggtcacccgggaggaagtttaggttgtactgaatatttcacagccctttacggaaaggtaatgaactatcatcttcctttcacgatggaaggtaaaaatgaagatcatttctatctttcgaacggacatatttctccggtattctattctactttggcaagattcggattttttccggttcaggagcttagtactttcagaaaattagactcaagattacagggtcatccgacgactcacgaaggtcttccgggcgtaagagtagcttcaggttctttaggacaggggctttctgtagctttgggtgttgctcagggtaaaaaactggacggagacagctctttggtttactctcttcatggcgatggcgaattgcaggaaggtcaggtttgggaagcatttatgtacgcagcagccaaaaaagttgacaatattatttctaccatcgattataacggacaacagatcgacggaagtacagataacgtactttctttaggaaatcttcatgcaaaactggaagccttcggatggacagttctggaggagaaaaacggtaacgaccttgaggcggtaattgccattcttgaaaaagcaaaaacggaaaccggaaaagaaaaaccggtagccattattcttcatacagaaatgggttacggtgtagattatatgatgggaactcacgcttggcacggaaaagctccgaatgatgagcaactggaaacagcattcaaacagttatacttagaggctcccgctgattattaattattagtaatgagtaattggtaataagtaatcttaattaataattagaaaaaaatgaaatttacatatacagaaaaaaaagatacacgttcaggattcggagccggattggctgaacttgcagataaaaatcctaatgttgtggcgctttgtgcagaccttatcggttccttgaagatggaaaaattcattgaaaaggctcctgaaagattttttcaggtaggtattgcagaagcgaatatgatgggtcttgcagccggtctcagcattacaggaaaaattccttttacgggaactttcgctaacttttctacttcaagagtttacgatcagattcgtcagtctattgcgtattccaataaaaatgtaaaaatctgtgcttctcacgcaggtcttactttgggtgaagacggtgcaacacaccaggttttggaagacatcggaatgatgaaaatgcttccgggaatgacggtgattaatccttgtgattacaaccagacaaaagcagctactttagcgattgctgattttgaaggtccggtttatttaagattcggaagacctgtagttcctgttttcattccggaagatatgcctttcgagatcggaaaagggattatgcttcaggaaggaacggatgtaacaattgttgcaacgggacatttggtttgggaatcgttacttgccgcagatgagcttgaaaaagaaggtatttcatgtgaagtgatcaatatccacacgattaaacctttggacgaagaaatcatcttaaaatctgttgaaaagacaggaaaaatcgtaacggctgaagaacacaactacatcggtggtctgggagaatctgttgcgggaatgttggcaagaaaaagaccgacaagacaggaatttgtagcagtaaacgatacgttcggagaatctgcaacgcctgctgaactgatgaagaaatataaaatagattctactgccgtgaaagaagcagtgaagagaattttagataaataatcaatttgttttacattataaaagctgttccggttgggacagctttttttttccaatttaatttctatgaatttaaatctttatctaaaaaacttccatttcggaataatcgccaacattccgaaacctgtaaaaaggaaaagattcgtaacgtcggtgtaaaggaaagtagacaggtaatagttgtgcataaagaaatgtagaaccagcagggcaggaaaggcaaagatgcctatttttctgtaaaaaaatatcaacacaatacttatcaccattaaggcatcaatcgcaaaaatagtgtaagcataccaagccgggatattaagggtttcgtgttgcaaatattcatcaagatcgatcccgaatcccataaccgtaaataagagcaatgctgcaagagcaaggatgaaaccccaccctttctttggatcttcgtcaaaatagctgtattcttccataactacaaaaataaagaacttatgagagatttcataagttcttttatataattcgtttaaaatttgattatacagagatcgcgttaatcagtctgtttttgtcgcttaagtactcttccatagaaatcatactttctgttctcattacatcctgaatatcatcgatttgatagatgattctctttgcgtcgtctgtattcttagctctcactttgcagaaaatgttatattttccggaaattacgctcgcttcaattacgtttggaatagtagatagttctttcagaacttcctgagttctgttggatttggttaataagattccgataaaagcggtgaagtgatagtctaactttccgtaatctatattaagagatgatcccaaaataatacctgcatcctccatctttttcactcttacgtgaattgtacccgcagaaacatccatctgcttagcaatttctgtaaaaggcattcttgtgttctctactaagaaatcaagaattttcttgtctatttcgtccagttgatagttcatattagttaaattacaatttctttaaaaaatctacatattttttgcaaatttataaaaaataaattaacaaaaaaaattataacaaagattaacaataattaacacatatgacaaaaatcattaaaatattctgattatttactacctgattttacagaatctgtttttatttcagtttgctcagccgtttgttttttatcttttttcttctttttaaatatagaattaaaactcttagaccaaacaatacccgctccatacgcttggttcgcagttccgtttgatcctgctccgttcaccattccgatattggaaggcttggaatatcctcttaataagaggcttccgtcatttttcttggaaatatcatattctatcgttccttctccggaaagataattaacgtctgtattttcagttttcgtaagcggaattcccagtcctgtctttactttaactcttggagaaagtgcaaaactaactcctgcattcgctctatctcctacattggaatactggtctccttttacgtaattaaggtcgatctggaattcgctgctcatcgtattcagtacagatcccaattgtttcagcaataaattatacccttgattttgtgctacatctcccacatttacattcactcctccagtctccgaaacattaaaggtactcaacaataagactgatccaaactgaagtactttttctccttcctgactcatttttgccgccaaagtttcttttatctggctggaaacatccaaagctgttacattaaggtcaattttaggatcaatcagcgattgggtaatatttgcctgaagcagaacactaatcggctgaagacttcccatattcaggtattctccggcgttggaaaccattcttacatagttcgctgtgatgtctaaagcaggcttcattgcatcaccgtcccatcttatgctgcttcctttctcaatctggaaagttttatttaggattgctttagatacaaatgttccgttatctactttatacgctccgttcatggcaatatttccctgtcggctcatctggaaacgaagcttttccgctgctccttttaccatgatatttcctaccccatctccaataagaacatttacggtggtccctttatctacatccaaagcaaaatcaatattcatattcgctccggattttttcttttcatccaaagtaaccagaccgtcttttccttcttttaaaaatttcagcattttgaattcttcaacgttggaggtagaacccgagttgaaagtaaatgtacttccgcttaaagctttcatattaggcgtggaaatactcaacccagaaacaggtccgtctacataaagatcaccctgtccgtaaactcttccccagaataaatccagatctttctgtgtggtatccagcattaataaattatcggctctcattacgaggttgactcccatcgatgagagggtttcaaactgtattgctccggaaatattccctttagaattggttcttccgtcatgcacctcaacactgttaagaatcgccaaacctttggttaaaggaattacagtatcatcaaaagaataatctacaccggtaaacaaaagttttaacccgaatcccttaagcgcaatatcgccgctgtaatccagattgctgaattttcctgaaattttaagatctccggttgctttccctctcagatttccaaaaactgaagtcacgaactgctgcgcaaaagcaacatcaaaatcacgcatttctgcggtaagatcaatagttggagaagctgtattgttgtttaccgttcctgttacatgaaggctgttattgcctataattcctgcggaatttactttgatatctacatcgtatacattcagggaataactgttggtcgcagaaatagtaatatcacccatatcatttccgttcatcatgatatcatcaatcgtcatatccaccaaaggctgcaatgtgtttttatccattttaatcttcacgctcccgtttgcaagacctttaatgttcatagaatttcctccggcttgcatatccagaagcttttcgatggcaaaattatccacttccgcatctacataaaaatccttggcagatttaaactgggcatctttaataaacaatgcactgttgtctgaaaaaatccggagattctgaatatcaaaatcgccttcttttttacggtaggtaatggaatggttgagttccggactggtatcaatcgcccacgttacgtcattaaacttcacctcagtaggctcaaacctgaacacaaaatctcctcctgcgttggtagactggttaacgttgatggcatattctttaagattatcatcaagctcatcttccggacttccgtgcttaaatttcgttgcgagatgaagaatggtattatcttcatttcttccgcttaacgtaatatctttaaggacatttttattgtataaaaccctgttgattttagcataaatctgctcattaagatttgcggtattgattcttaccatgacgctgtctaccatcgcgctgtctctggtaatattatctctttcgttgatctgataatcaggatttgcagcagccagagctttatccgcttctgtgatctcctgagttttcgtcatgatatacttcagtgaagccgcatctacattcaggatcagattattggaatttccgtcgtactgtccttctacttttgcgccctgcggaattttaagatccggtaaaaaatagcttaccaaaccttgctgcacatcaaaattcatggcaaaagtctgtcccctgtacatttttctcggcgcaggacccacaagaattttattgagaccgttttctaccattccggcaagatctcctaaattatatcttcctgaaatttttccgttaacagctccctgagcatccacatcaataacacgtcctccgttttccacaaaagtcttcagttttgcattcggaatggaatatttctgagttgccgttgcaaaattaattccgctggcttccacatccagtgttaaatcgttgatggatgacattgccattttaccatttaccttcccgcttacaatctggtttccgggtttgttggtaaaataattcatgttcagataattaacatccgcattcacattcatcgaaattcttgaagtgctgaaatcaattaatccttttatggttgcttttgcctgttcatcattcacggtgatgagtccgttgtattttttatgatccaataatccgtcgagatacagattattgatctccttattcataatttcaatgctcgaaatctgtgatttcgttgtcagtttcatcgtattcacatcgaaactctgtccgttgatattgaacttcccagaaattaatcctacggatttgttttttgtaatcacggaagtattaagatccttcacttcggctattccgacatattttggcatcggagagctgtattccgttaaagaaaaattcgtgatttttgcctgcccgattcccgtcatcagatttccgtttgaaacatagacacggttaggatttacacttgcggttccgttgtattttaattttccgaaatcatccgcaaagtttttcatttttttagcgatgaatgaaggcataatggctttcagatccttataggtaaagtctgcggagagatcgttggtttcaattaaaaaattacctttcaacagtttattcactttcatttttttggtggcaatattcacatcaggatttcggatgagaaaattatccagtttaaaatcattcagcggacctgtcattttccctgaaacattgaaaggtttaaagttatcccagttcgttacaaaataactgatgtcgtaaccgcttaactggcttcccagttttaggttcatgtcccattttactttgtctgcaaaatctgcccacgaaccgtcatcatgaaggttgaatttaatatctccctgtaaaagcgagtgatctgtgtttaaagtaaggtctttaaggaaaagatattccggcgtcatggagagctccgtagaaaaagtatccacaaaatgagattttccccatcttgttgtggtgaaagacatattattgattgatcctgaaatatttcttccgtttacttttacattcggggcaatcagattaaagttggttgcggttaaccatttccctttttcgcccggagaattcagattaacgatggaaactttagaatccagaatctgcaatcgggaatcgagctgaaacggaggtttattgggatctctttttttaccgctgtcgaacaattgtgtaaaacggataaagtttgaaatactgtcgcctttataggttatcacttttacatccgcattctttaaagtaagggaattgaagcttaaagaattatttttggtaatattggaggctaaagaaagccagttggaattggcaataaattctttggaatgaataaaatcgtatcctttgtaatctttgatctttaaacctttgatttttacatttccgaaaaaattaacctcaacgctttcagttgacatctgtgctttaaagtcgcgattaacaatttgtaacgcctgatctgccgcccattgttttgtggaaggaagattaataattacaaaaatggctgccaccaaagctaaacccagccaaaagagaatcaatagaagttttgcccaccaggaataactcgtaacgtcttttaccgcctgttttccaaattcttcagccgtctcaatgggatgattaatagcatctgaagcaagttcagacgcttccttaactgtttcttttacaacaccttctgcattttcaacagctttctgtacctgattacctaagttaccagctactgattttttgttctcattctcgttattattctctaactttgccattattatgagcgactctataattttaggtattgaatcgtcctgcgacgatacatcagcagctatcatcaagggaaattctattctttcgaatattgcagcgaatcaggcgatccataaagaatatggcggtgtagttcctgagctggcttcgcgtgcgcatcagcaaaatattatccccgttgttgaaaaatccttaaccaaagcaaatatacaacaaaatgcaatttctgcgataggatttacacgcggaccgggacttttaggttctcttcttgtgggaacgtcatttgctaagtctttggcaatgagtttggatgttccgcttattgaggtaaaccatctccaggcgcacattttagcccatttcatcgaggatgcaaatcctgtgccgccaaagttcccttttttgtgtcttacggtgagcggaggacacacgatgattgttctggtgaaagattatttcgacatggaaattatcgggaaaaccattgatgacgccgcaggagaagcatttgataaaattgggaaaatatttgatctcgattatccggcaggtcctattatcgacagactggcaaaagaaggaaatccggatgcttttaccttcaataaacctaaattggaaaattacgattattcgttcagcggaattaagacttcggtgctgtattttattcagaaagaagtaaaaaaagatccagatttcattaaaaacaatatgaatgatctttgtgcttcggtacagaaaacgattattgaaattctgatgaacaaactggaaaaggcagcgaaagatttaaacattaatgaagtggcgattgcaggaggagtttcggcaaattcggcattgagaaaggcgatgcaggacaatcatgaaaaactgggctggaatatttacattccgaaatttgaatatactacggataacgcggcgatgattgcgatggttgctcagttaaaatttgagcgtggagaatttactgatctgagaacttcagcaaccgcaaaatacgatttatgaaaatactgttagaggagaaaatacttggcaaacattctaagaaaaactccaaatattactggatcttagaaacggtgacgggtaagaatgaagcatcgaaggatttcgccgattattttccggcaagctcagaaacgggatatgttcagaatatcaaggaagaaattattgaacagatcaatgcagaaaatgttttcagttttgaatatgaaccgaaagaaggagattatttatccatcaaaaataatttaagaaaaaatgaatatctgaatttgattttcttgaacaataaatggattgaggaaatttacacctgttcttacagagattgtgaaggcgatatttatacaaccataaaaacaggagtggcatttttaagcgaaaatgaaacttacttttaataattagttagaaaaattcaggcagattataaatatttaaatatgaaacttttttacggagaaattgaaggaaatggagtaacgattaacgatgaagaacagcaacacattgtaaaagttcttcggatgaaaaatggtgaagccattcatgtaacggatggaaaaggaaatcttgcttccggaaaactgatgattgaaggtaaaaaagcccatattgaagtggatgagattaaaaataatcttcctgatttcagtccgaaacttcatattgcgattgctccgactaaaaatattgaccggattgaattcttcgttgaaaaagcggtggagatggggatttcagaaatcacttttcttcagacagaaaaaacagagcgaaaaaatattaatctcgataagatcagaaaacaggcaattgccgcatccaaacagagtttacggtttcattttcctataattaatgatgtaatgaagattcaggattttcttaaaaatattgatcctgaacatacgtttgttgcgcactgccatgagaatttagaaagaaccgaactcaataagattcccaaacttaaaaatattacttttctgattggtcctgaaggcgatttttcggaaaaagagatttcttttttagctgaaaataatatcaaagcagtttctttgggaaatcagaggttgagaacagaaaccgctggaatttttgttgccgcgtggaattataaccagatgatttagaaaccattatcttcaccttcctgataatgggtcatggttagctttttatgcttccactcatatactttatagtaatagtttactggaccgacatgataagtcgatgtaattgttttattttttttatcaactacaggattaacgatcgtatccattggcttgtaatcatcgtactttttagtttttttattgtacagccagaaacttgatgaagaccagtaatttcccacctgatttattacttccaaatccttaaatccgtcaaaatttacatcctgacttacattaaaatacgcttcagattcatttaaaacagaaaccgtatcaaaaataattctctgatgaagtttcttctgatgaaaaatatcaattgatttaaaattgattccatcattaatattctgtcttccttttaatatataagaatatccgtttccggttaaggtttttgaaaaggaaaccgttgtggtatcttcaggttcttcttcactgagattttgtgaaaaagtatcaacagcaattttagcttgaggtatattatcagtctttttattgcagcctatcactatcagaactacgaaaagcaccgttaatctcataattcaagatcattatcttttaaatatttatcaaaaatctgctgtccgcttcttatggagtttactgcccaacggattttcatccttaagagtttttcttcattcagtttatagtcgatatcagatttcaataatttctgcttcagttcatacatacaaatggaagcggctacggaaacattgaaacttcgggtaaaaccatacatcggaatcgccagcgtttcgtcggcaaaatccagaatttcctgagaaacgccttccatttccgtcccgaaaaccagagccatcggttctgtaatttcgtattcgggcagcattttggcattattctccagcgaaaccgcaacaattttatagcctctgtcttttatgttttggaaagattccatgcttctcggcattttttccacttctacccacgtatctgcgccttttgtaacacgaagattgggttcaaaactgtattcttcctgcaaggccaccactttatgaaaaccgcacgcttccacagaacgcacaattgccgctgcattcctgaactgatagacatcttccactaccggaagaataaaatctgaactttccggcgcaaaatgctcaatcttctgtaatctttcttccgttaaaaactgctttaaatactcaaaagtttgctgtaaatctttcattcattttcaaatctttgcaaattaacgtaaatttgaggaatcctgcgaatggaggataaaaatctaagaaaagtcctgtatgaaaagaaaagtcctgttgatatacaccggtggaacgatcggtatggagaaagattatgaaagcggaagcctccgtgcgtttgatttcggaaatattttcgaaaaaatgccagaaatgaagctgatggaatgcgaagtttttgttcatccttttgaaaaacctctggactcttccgatatgggacctgaagaatggaaaattattgctcattatattcagaaaaattatcaccagtttgacggatttttaattctgcatggcacagataccatgtcttacaccgcttctgcattaagttttatgctgaaaggattgaaaaaaccggttattttaacgggttcccaacttccgatcggagatttacgaactgatgccaaagaaaatcttctcacgagtctttattatgcaagtctgtatgaaaatgacgaagcggttattcaggaagtggcgatttattttgaatataaactgttgagaggaaaccgcactttgaaatattctgcggagtattttgatgcctatgcaagtccaaactatcctattctcgggcaatccggagtacatttaaatattatcaaagataatctttaccgctgtgatcctgatattgaatttcatgtagacgatcatatttcggaagatgttattttctggagaatttttccggggatgaatctgaatcattttaaagaaattccaaaaatgaaggttcttattcttcaggtttttggctcgggaactattttcagcagtgaaaaaacggtggaaacattgcagcagatccgaaataacggaacagaaatcgtggtggtaagtcagtgtatttcaggcgggatatcatttggaaagtatgaaaacagcaatattttttcaagaatcggagccatcagcggaacggatattaccgccgaaagtgcgattactaaagcaatgcatttaatagacaatccaaattacacaggaaactttgcagaaaacttctccaaaagcctttgtggagaaatttccggataaatttgcattttgagtttgcagattccggaaaatagtctatttttgcaatctcaaatacaaagagaggtgtccgagtggttgaaggagctaccctggaaaggtagtatacgggtaactgtatcgagggttcgaatcccttcctctctgcaaataaaaagtcttaggttttacctgagacttttttgttctttcaagtttatggttttagtatgatacttctttttaacgcgaagagcgcgaagattttcttttaaaaaacttaccggatattttttaagttcgcaaaggcgttctactaagcaaagaactcagaggtttttcaatgacgacaaattgcggacaataattaaaattttgaacatagataatctaacaaactttcaccgatggaatccggaacaatatcattttcgataccaaaaccattacctgattttattaaaataccatttcgataatctgcataactttctaaagccatcgttttttcttcgcacttaaatttatatttttcaagtgaaacgataccactttttttaatagttcctttttttgttttcacaattttatcggttctcacaatttttaaccaagtttcaatgtaatctgtataatttcgttttttataatcctttacataatactcgctgttatcgctgtcgtttcctacgtattcacattcggtctgtgcataagaaaataagggaataaaaagaagaatgaagagtagttttttcgtagtttagttttttttcaaatataggaaaaagaaaaaatcaaattttacgtgaaatcataaaaaaatcccagtttttcaaccgggattttctgtttgaaaaagtaccaactaatttcaaactacaatttagctatatgaatgttttggtgttttggttaattgcacatcgttaaaaactgatggctcatctgtactttgaatctcgcgtctgatttcagtttagaatagatcatgctttcaaaagcctgtacttcttttaatttctgatcaatatattctgcgatctgaacaacggaaaagagaaaatctctgtatacggcaatattcaccgtttgtccgtgaaccggaagataggctttcagaaaaggaattgttgtttggtgttggttgtaattcacacaatatcccgctccttcacgcgaagtgatgatctcaaaatcgttgataaaatccagcacgtttttatcttctttattactatttttcgacaagtatttgttgattttatccaaaatatgctgtgcatattccatcatcgtaacggttttccattcgaactgatgattgatttttttcaaatttttggcaggctttccgttttcacaggtggtgcagaaagaaatcccgattttatcgtgataaggaaaaaagcagtctttaatctgtagggaagcatctgcctgaagtctgtcgttggcaaagttgtaatacagataagggctgtacagatccgaaagtgctttcagatagtcggtttcgcttgtattcttatattcctcaaaccatttttcaaggttgtcgtaataggtatttttaaactctttaaaacttagatataatggcagttccatagcttcgtaattttgataagacaaagctattgcggtaatgcgacaaaactcgacgtgttattttttagttttgatttttttttgaattgatgattttggattgatgtaataaagtgaatacgatctaaaatacttccactgattcgcgctcaggataacattacaaatgccaattacctgaaattcaattgtaaaattcatcattcatcattcatcatttatcatttatcataattcgtcataataaattcaaaataatgaatcatcttcatataattttcgatgctgagatattcattggtgctgtgaatgctctgttgctcagaattattgattttaacaggcataaatctgtaaatgtttttgcttaccatctgatatttgtaggcatccgttccgcccagtgtaagatacggcgttacaatagctgccggataaagctgttttactccttgttcaattagctgatacgcttttgtattgcttgatgaaactgcggaagcttctctggtattgtcaatttcttccacttccacctcaaaaccttcggttgctttggcaatatgtgcttttacatcttttacggtatttccgggaagcagcctgaaattaaccacaaattccacttcgggagaaagtacgttggttccgtcacttcctttcatcatggtaagtgccgttgtcgtacgaactaaagcattggtagaattatttttggtaagctgagaaagaagaagcggtttcaaaagccattgattggagattgccattctgctcgggaaagacattgaacctcctatattatcaaaaaactgttggattaaaggggtaattaccggtttcatctgatcgtcttccagtcgctgcataataacggcggcttttccgatcgcactttccatgggcggtgtcgacgaatgtccgcctaaacctttcacttttattttggcagaaagaaaacctttttcggcacagccgattaccgctacatccgaatcgattccggaaatgcttcctttttctaaaattaaaccgccttcatcataaacagcatcaaactgtatgttttttttcttaaaataagaggcgatctgtgttgctcccttcttccctcctacttcttcatcgaatccgaaagccagatagatatcgcgtttcggcgtatgtttatttttaattacattattcatggattccatcagagaaaaaagcattcctttcatgtcaattgctccgcgtccgtaaattcttccattggcaacggctcctgaaaacggagcaaaatcccagtcttcagcaacttttgtaatggctggaaaaggtttatcattgggtctgaaaacattttctgctgtatttttcacctccgcatctccgggaggaaccacatcaatatgagacagaaacataatgggcgcgagacctggattgcttcctctaagcctgaaaacaagaccataagtattcacctcaacatattctgtatttttataaacttctggatatgcttttttcagatattctttaaatgttacaaaaggagaataatcgaaatcccctaattctccggtggaaactgttgggatctttaatccctcggaaaaacgtttaacaaccgaatcgttctttacaaatttccatcctccggaatctgcctgatctgtttttttgaaaagataggtaaatgttctgattaaaacaaaagtaatgagaatgatgataatactcaaaaagactaaaagaaacttcttcatgattattaattttatataaatataatgaagattttacttctaaaacagaattttactttaaattcttacaacttatggaatatattacagaaagctttacaaacaacatgattttaaatttagaaatcacattctataaataaatatcttctgcaaaatagcataaaacaaagtgtcacatctttttatcattctccagctcctcctttctctttttaataaaatctgtagggcgaattccgttgatttcgtaaaaaagatctgaaaaattctgtcgggaagcgattccgcattcttttgcaagggtttcgatgctgtattttaagtattttttatcctcaaaaagcagattggtgatgtaattgattctgagttcgcttaaatatttattgaaattcgcttttttatattcattaataacctgagaaagatagttggaattagtacctagttgggcggctaatttactaatggttaatcctttttgtgtaaacccctttttatcttcaaacgttttaagctttttcagaagttcttctaccttattttctgtaatcgtaagctttttttcttcgatctgcggaacaagttctttggtttcgtccatctcttctttctgatggtttgccgtaaacttctcttctactaaaatatactttttctgaatttctttggattttttatgccttctcgtcagcagaacaaccagaccgattgcccagataattaacacaatgataataatagtcccgagataatttattttctgaagcttatttttttcatccagtaaagtatcggtgtcgtaatctttatgaattttcggggacagataaataaaatctttagacataatgctgtctgcccgaagcaactggcttgtgtaatagagctggttcttctcgtttttctcttttttggaataatcgatcaggatttcataattttccctcagttcaggaaggataaactgatgtttctgaaaaatggaatctatctttttaaaataaataatagattgtttggtctttttaagatcggaataagttttcccgatgtagaaataacttaccgaaagccttgcaaaatcgcggctttctctgatcacgggcagagactgattaaagtcttctaatgcttccttgaattgatttctcttgtattctgaaatacccttcgacaaaaggaaatatcctttttccagagcataatccggattatctcctacttcagaaagtcccgtctgtatagcagcatccacttcttcctgtttcccaagatgcctgttgcagataataagctgatgaagactgttgagataacctttcttattgttataaatttcgttaggatgaagtttggtgatggatttcgccttttccctgtaataaacaagacattttgtaaagacctgtgaagcatcttcgtaatagccgagatagctttttaccactccgatatgatacagattctgatatttcagatattcatttctggtatttcttgaatatttataagcctcaagatattcgttaagagcaagttgaaactttttataatggtaataataaataacgcctttatcaatatgggcaacaattttaagatcatcctcattggtctggttggctgcccagatcatgctgtctgcatacttcagtttattttcatttaaagaagaaaaaaataccgcatctttatatccctgaaccagtttttcgtaattcttttccttttttgccaaattgagatatggctttataaaaggaaatgccttcatgtcattttccggaaaatcttcatacttcaacctgagtttataatattcgctgtatccttcctgcgagaagaataaattaacaattccgataaaaagaataaaaaatagattttttttcacccctgtttaataatcctatgtgtaaacttcgtcaaaagtacagaaaatagatcattttttatcaaagattattgaattaaaatgtggtatagaattatttctactttacaaatatatcaattgaaaatcaaccaattaaataataagtacagaaatattccgctgtctcaatttatgaataatgaccgcaattgtttttttatttcaccacaaggttataatttcgaaaccggaaatcaaaacaatagaaaaaaattaattaaagccgttttatataatattgaatagaaaagaagccctaaaaaagcacatgcagataaattttgaaagctaataaaaaacatgattctattcataaatcttaccaccttccttaacaggagaaattacttttttggaaggctggtttttttaaaatttaatttttcaaaaaaaagctaataaccattttttgaaatacaataaccgcgaagaaataaattagtcctgtatcctacaggtaaattgggaaggaggttctgaaatatgaacctttttattaaagttttcagttttaatcgaaaagagactgttccttacgggcagcctcttttctttttaaaacattaaggatttacaaatcacttccagcctccgcctaagctcttgtaaatatcaacaactgtactcagttgtttttgtttagcttccaccagttccattttggcatccaaagcgtctctctggttcagaagaacttccagataatcggctcttgaatttttaaataactgattggctatatctattgatttttccaaagcctgtgtttcttcagacttcagtttgtaatactgatcgatgtttttcactttagacattaaattggcaacgtccagatacgcattcagaatggttttgtcatattcgtacaacgcctgaatctgtcttgcatccgctgtctgaaagttggcttttatggcacttttattaatcagcggacctgccaattctcctaccagacttgctgccatagattccggcaatttaaccagataagatggtttaaaagcttccagtcctaacgttgcagaaatttccagactaggataaaactcttttcttgctgcttccacatccagttttgatgattttaattccaactcagcctgtttgatgtcggaacggtttgccagtaactgtgacggaattcccgtataaactgtttgagggatcatcgacatgaaatctccttttgatcttacaatcggctgtggaaatcgtccgcaaagcgcattgatttcgttttctttttcagtaatttcctgacggatggtaaattccgaagctttagattttgccagttccgcctcgaatttcttcaccgccaattcagttgctgctgcagcttctttctggatcttcgaaatctccagagctctctgctgcaatttcgtgtactgctgaatgatatccaactgattatccagagccaataattcataataattatcagcaacttcctcaattaagttcgaaagaacgaaattcttcccttccacggtagaaagataatgtgctaccgcagattctttctccgttctcagctttttccagatatcgatttcccagtttgccattaatccgccctcaaaatttccaagcggatccggcatttcttttccgggttctatttctgtggtggcatcacctgctccttcgctggtgtagcgtcctgcttttttcacacccgcgccgattcctgcggaaacagtaggtgttaatcttccttttttcgccaagacaccgctttttgcaatctcaatttcctgcaaagtaatcattaactcctgattattttttaaagcagtttctattaaggctactaaattaggatctgtaaaaaactgtctccaaggggttgttccgctattattattggcatcaccctgatcctgctgattaaaattctgaggaatattttctttcacctcatcttttaccacggtcgccatgggcgccttacagcctgctaaaacaagcgataaggcaatggcagctatatatcttttattataaatcttcatgtttgtcgtcgtgttggtacggttctgtttgttctgttaaaggattttcctcttcatattttgccagtttcgatttttctgcgattgttccgaagatgtaatacaatccagggataatcatcagtccgaaaatagttccgatcagcatccctcctgctgcagcggttccgatggtacggttaccgattgctcccggtcccgttgccagaaccaatggaattaaacctgcaatgaatgcaaatgaagtcatcaaaatcggacgaaaacggatcgcagctccttcgatggcagcctgcgcaacaggaattccttcttccgcttttttctgtacggcaaattctacaatcagtacggcatttttacccaaaagaccaatcagcatcaccattgctacctgagcgtaaatattgttttccaatcctaataatttcagacataagaaagctccgaaaatacctgtcggtaacgatagaattaccggtaacggaagaatgaaactttcgtactgtgcggaaagaatcagataaacaaatcctaaacacactaagaaaatgaaaatcgcttcgtttccacggcttacctcgtccttagaaatacctgcccaatcgatcccgaaacctctcggaagtgttttatccgccacttctttaatggctgcaatcgcctgtccggaactgtaccccggcgcaggagtaccacttacctcggcagaattgtacatattatgtctggtaatctcggaaagaccgtacactttttccagatgcataaagtctgaatacggaaccatttgctccttatcatttttaacatacaatttcaaaagatcactcggtagcgcacgatattgaggtcccgcctgaacgattactttataaggtctgtcgaaacggatgaaactggtttcatagttcgaaccgattaatgtggataaattatccattgcattttcaatcgttactcctttttgttcggcaagatcattatccactctcaacatatactgagggaaactcgcggaatagaacgtaaacgcagaacccagttccggacgttttttcagttctcttacgaagtcgttacttaccttttccattttttgataatctccgcttcccgctttatcgagcagacgaagctcgaaaccacctgctgcaccgtatcccggaatggaaggcggctggaagaattctatattcgcaccgggaatattcttcgctttttcttcaagcttctctatgatttccgcggcagattctttacggtcttcccagcttttaagattaataagacaagtaccggagttagaacctgtaccttccgtaaggatttcgtaacccgccagtgaagaaacagactgtactccatcgatatcttcagattctcttaatagttctttggcaatctggttggttctttccagtgtagaacccggaggagtctgaataatggcataaatcattccctgatcttccgcagggataaatcctgaaggcaatgaattgcttaaaaagaatgtacaggcacagaacgccaataataatggcaaagtgattgtttttttcttcaccgttttattaagcatcccttcatatttgttagctccttttgtaaataatccgttgaatttatcaaggaaaatagtaatcggagttcttcttttggcttttccgtggttattttttaaaattaaagcacataaagccggcgttaatgttaaagctacaacccctgaaagaataattgcagaagccatggtgatggaaaactgacggtagaaaactccaaccggaccggacatgaaggcaatcggaatgaatacggatgccattaccagagtaattgcgataattgccccgctgatttcgtgcattgcttcttcagtcgcttttagcggagataaatgcttctcctccatcttggcgtgaacggcttcaattaccacaatcgcgtcatccaccacgaccccgattgccataacaagcgcaaagagagagatcatgtttaaggtaattccgaaagcggacatgactgcgaaagtacctactaatgatacaggaactgccaaagcaggaattaaggttgaacgccagtctcccaagaataggaatacaacgattgccaccaaaataaaggcttcaaaaagcgtatgaactactttttcaatagaagcatcaaggaattttgatacgtcataactgatgtcgtaatgcattcctttcgggaaagcggttttctgcaattcttccatcaaagattttacattcttgataacgtcacttgcgttggaaccatacgattgttttaccgtgattgccgcagaaggctttccgttcaaggtagaataaatatcatacatggacgacccgaactctatatcggcaacatctttcagtctgataaattctccgtccggttttgctttaagaatgatatttccgtaatctttttcattattaaaacgtcccggatattttaaaatatattcaaatgactgcgatctcttccctgaactttctcctgtttttcccggagaagcttctaaactctgctgattcagggattccattacttcatctgctgaaatgctgtaagccgttaatctgtccggtttcagccagatacgcatcgcatattctcttgttccgaggatatctgcgaaaccgactccgcttacccttctcaattcagacattacattgatgtctgcatagttgaaaaggaatttctggtcagctttcggatcatcactgtacaggttaatgtacatcagcatattgggttcttcacgggtaattttcaccccttcacgaacaaccaatggcgggagtttattaaccaccgaagaaacacggttctgtacgtttactgctgctacattcggatcggttcccaaatcgaaaaccacctgaatggaagcttccccgtcgtttccggcatcggaagtcatatatttcattccgggaaccccattcagacctctttctaaaggaataacaacggatttaatcaacaattcattgttggctccgggataatccgccgtaatgtttactttgggcggagaaatggacggaaactgggtaaccggtaattttacaagggataaaactcccataaatacgataatcaaagagattacgatagacagaacaggtctgcgaataaatttcttaaacataaaataatgatgaattattaatgatgaattataaatgatgattatgaagtttttgcataatcatgatcacgtatcgattatcgtattctactctgcttttaattttaatgactgaagaacttttttcggatcctgaacttttgtctgaactttctgatcgtcttttactttctgaactccttccagtaagattttatctccggttgaaagccctgaagcaactacgtatacatcaggaagctcataagcgatctttatatttttagattttgccactccgttcttgtctaccacgaaaacatatttctgatcctgaatttcgtaggtagctttctgaggaatgattaaagcgtttttcaatggtaacgtcattcttacttttccggtttctccgtttctcagaagtttatccggattcgggaatttagctctgaaagcgatatttcctgtttcactgtcgaattccccttcaatggtctgaacctgtcctttctgtggaaagacatctccgtttgccataacaagatctaccatattgcttcctcttgaggctacatttctctgatagttaagatattccggctccgaaacattgaagtacgtataaatatcgttgttatcggaaagggaggttaataaatctccttcatctaccagacttcccagtttcaaaggaattctgtcgataattcctgaaaacggagctttaatgtctgtaaaagaaaggtgaatctgtgccagtttcgcttcagcattggctgcatccagcttagctttcgccattgctctttcgtttttggaaacgatgttgttgttggctaatgtacttgcatttttcagttcaattgttgcctgcgcaacttctgcctgagctttcagcaattctgcctgatataatttcggcataattctgaataaggtttgtccctgacgaacaaactgtccctcatctacaaagattttctcaagaaaacctttttcctgtgcacgaacttcaatgttctttacagatcttacctgcgccacgtattctttatcgatcacagtatccatcacaacgggtgaggttaccggataaacagcggcttcttctttttcttcttttttcttgttacaacctgtgaacaataaaatactgcttagcgcaatgcttgcgacaactcttttaatcataattctagagtttatgtaaatcgttaatgttttaaatatgaaaatggcaataagaggatcgacggaataattgattgccggcaattataacgcaggattttcccaccgaatagctaatcggcagaaaacgggtttgaaaatgtggattttaaattctgatagaacgaatcagaatgaattttttaacagaagagtattctgatatacagccatgaatagctgattttagttttttgaaactttttaaaccaaaaaaataaaccaacgtaaagacacttgcaaatacagcgattgcctgaaaagtatctgacaactggaagtcgtcttcggcaagttcgagcgtgtatgtattgcttacatcgtctgaagcctgctgcattgacagcttttcgtaggtttggtttagacggtttgcttttttgggtaaattctgagaagtgtgggtgtaatcgtttcgtaaagttttgacattgatcttgctttctaccacaaaaagcagaaaaagagtggtcaaaaaatatacgatatagtttctcatgatttcaaggcacaaatgtagactttagttttgttatgtttcaagacaattgtgtgacaagttattcatattaacaatatttaacacttatttaaattcgctgaatttgtttaaatattaaaaaaaagatctacttaaaagcatataaacaaaatgattatcaaataattaattttaaaaaaaaattaaatcagacttaacaacatacttttataaagttcataagtcatacaaaccgccttagataaagttaaattcttataaaattcacatattactgataaaaattaaataaaataacatttttattaattttttcatataaataaaataatatttattatatttactttaaaataccactgaaaattctcacattttatttgtttaaaactgacattaatattacaacatgaaaaacaaaatctttatttcaggattcctgcttgcctctttttttacatttgcgcaagttggcattaacactacgtctccagacgcttctgccgtcttggatgtgagttctacaaacaaagggattttaggtcccagaataagtcttacttctgctaccatgcagcttggttcggctcctaatgccgatggacttttaatttacaatacaggccccacaataacaccgggatattacttctggaatggatctgagtggagggtttttaattcttcgtcttcgggaagcggctcttctcaggctcttgccaatgtggaaagtattgccgtaatgggacctcttacttctacttcagacaatggaagagccggatatgcactgtctataaccacaccggacggaagattttcggtaagaacgttcatccctacaaatacaaatttctcgcaggtaaatctgcaaataagaaacaacactaccggagtagtggaaattatatccaacggacattatctttggtccggagccggcggttatatgcaaaaccagttaagacttcctgtaggtgcatgggcaggagataatgcaacttccagtgcgtctcttattgatgctaccacaggtgcaaggatacaaaccgcatctaccaatccttattggggagatcctgaaacctatgccggaggtatgccggaacagcgtttatactcttggactactactgacggatctgataaaacattttataagatgtattatatgatgggttcttctactcccggaaatgccggaaacgcaacaaactgtccgtccggaacctgtaataccaccaaagcatttttcacaatcgaccagattaaagcgccataggattctaaaaacaccactgattttgagagacgttcccggaatgtctcttttttattttgatgatagcaattttaaatatgtgcagattatattaaacagcaattcttaatttaacataaaatatttaatggtattaaaaagcattaaattttaattaatttataaaaaattaacatattattactataaaaaattgtaattttacagcattatttatactgcattataaattaatcacctaaaaatcacttattattatgaaaaaattattacggattattatgttaacaggttttgtactcatcatccaaacagcatgtaaaaatcaggtaaaagaggaaattgtagaacctgaaaataataccgctatacaacaggagcctgataaaattacccgagaagtttatacagatgaatcgggagaacagttggaagtaggttttaatgagacgaaaaatactgttgtggttcatcttgacggtaaatcttacgaacttaaaaaaagcgatgaactccctgattttacggcaggagacgcaaactatcaatactctgatgtgcgcggtgaaatcactttcctgaaaaaagattataatatggttctattccatcataaaaagaaaaaatcttcttcatctaataccaagatggcttcttattaatcacaaaattttaaagttatgaaaaagctaatcatttacttttgctcgttattggttgtggctcttacggtttcctgcatgaataagtcttctgcaaccagtacttctgaaaataattctgacatcaccggaaaaacatgggtgctgacagaacttaacggtaaacctattcagcttaaaaatcctcaggtaatacctcattttatgctaaatacttccacgatgagatatgagggtcatggcggctgtaacggagttggaggtacttttgagataaaacccgaagtaatgcgcatcaaattcaatcagggtatatctacgatgattgcctgcgatgatcttgaaacagaacgtgcatttacacaagcgttactttcggcggataattattctgtgaatggaagtactttaacgcttaacaaagcaaggatggctcctttggcaaaatttactttaaaaaaataattaaattcttatttgtaagaaaaaacacttccgtcaaaaggaagtgtttttaatttagactatttatttttgtagataagacagtaaataagtaatgtaacatttacaactacggaaaatgcattggttaaaataataggcagttcatctttaagaaatccgtaccagatccatagagaaactcctgaaataagaacgataagcattcccgaggaaagatcatcggcatttttttctttaattacttttatcaattgtggaatcatcgatcctgaagtgagaagaccggcaattattcctaaaacattttcattcatagctgttatttacatctgatatagcaaaaattatgtcaattgttaaaagaattttaaaatttctaagatcccgttgaaatgataatcttttttgatttgtatttagctgttacttttaaacaataaattatatttttttgtgaaaatttaatgtaataggtttatattttcaatactaactttttattataaacctttttagatcaacttcttcatgtaaaggaatattgttttcaataaaatcatataaacttttggagaaatagcaaccatttaaaattcctcttgctcccaatccattgaaaacatataaattgtgatgttcaggatgtcttccaataattggtcttctgtcttttacggttgggcggaatccaaaattgatgtctttaatttcaaaaggatgaggataaaattccatcagaccttttttaagctgttcaacagcggactcatcaatttcatgatgaagctgttctctatcataagtaccaccataaaaatacaattgatcattcaacggaaaaagaaagtgctttttcttgatggtgatattttccgtaattttttctgaaagctctactttgatatggtgacctttattggaatttacaggaatatcggaaaaaaaaggattttgtaccactcccattccttcacaacacaaaatattcttgaaagtaaaatcctgataaatggatctttctacatttatgtctgaataaacaaatttttctctgattaattttccacttttatctaaaaaatcaaataaacctgtgaaaaatccattaacattcaatcttgcagactgattaacctttcctgaaagaaagtcgttttttacaacgtttaaacgatcaaaatttttatctaaaaaattcaaaagatcatcatttccggatttctttaaccaaagtgactgttcattttcatcatgaaaaattctgtggatgggtgcatcgatgagatagttttgtcctgtgtaattctcaatttctttcaaagtgtttttaaggaaatcaatttgttcctgtgctttccagaaagtggtaaattttttaagcacaacagggtttataattcctgctgaaacctgtgaagcactcttcattttttcagaaaacatcacgaaagtcttattgtttttgatcaactgatgcgcaaagaaaagtcctgcatatccgtctccaacgataatataatctacattcttcataataaaaaaaacctgagtaaaaatactcaggttttctataattatcaagtgaaatcttagtaattccacatatcattttccatttgaaggatctgcgccttaattctgtcgctttcttcaatctgatcttcagcatctcttggaatgtagtctttgataagtccatcacctaatcctgctgatgatttataaataacagaagaaaatcttctcgcgttgattaaatcatcaaaagataaatctgctgatgaattttttctgttataaacgtaattattagccaagatatctcttgcacttggataataaatccagaaaagatcaattaattcgtctgcaccagataaaggttttccatcaggtcctaatttaccttggatagatgggtctggtcccattgcggatatagcaagaggtctatacttcaactgtccgtcccttttatcaataaaccacatacccataatcttaagaactttaactttatctgttgttgtcttaatataatcagtatactcttttttctcttgttcagttaattgacgacctgaattcaaaatatctattgctgcgtcatcaataacaacagcctcaagtctttttttaattccttctggagataacttaaccgttaaattctcatcatcatacacatctttaattttctcatctaaagcagcatctaacaataattgataaagagatcgtgtttgattagaagttaaaccatctggattatcataataaaaaggctgattgattttatcattcatatcaatgacttcccaaacaaacatacttttaagaatgtctttctcatcaacaaaaccatattccaaaggttttacctttttgtcaacaatactatcaccaattttttgtttgttttcagctctcatttgtctaaactcctctggagaagaagcgttcagtatagtttgggaaaaagcaaaacccgaaactaacactaggagaccgttaatatattttttcataatgtaattttaagtttataaactattgtatattaataacaattggagatatatttttaataacctgaccatctaaacctgtagcagtagctttaatatcataaatgtaaacaacatcacctgatcttaaattttttgtcaaccctgcggcttcacttaatgtattacccgaaatcaacaaaccagctctacccggaactttaaccataaatccagtcacattgaatgatacagggaaatcaaagtctggaatagctgcttgtacagactgattaggtactgaagttgcaggcatagtcaaaatatttttacctctcatttgtccttgcggtggtggtacatttttaattctgtattcaaagacctgtgaaactgtttttccattaggatcttttccagataatgttaatttaactgtattaccagcttgaggcttcacaatccatttacctgaacctgtacttcttacttgagctccaggagctgataatgaaagtttagaattatctgcacctaagatagatccagaaacagggttctctaatcctctatacattacattcattttatcagcagaaagtaataatccttgttgaagttttacttgctgtggtcctgcaataacattataagtatgtgtccaagggaaagattgaggtttacctgtagcatctgttaatgtaatggttccgtttaaagtatgaggaccttcaccatttcctgagattgggataattccttttccattctcttgtctacttactcctgtaatattaatcttattactattagaatatgtacctaacattactttaacttcagcttgttgtccagcctgaatatctacaggacctgaaacaatcggctcatagctgttaaatttaatactcgcatctactttctcctgtagcattaatgctaatgcatcagactgaacgtttcttgcatcattctggataatttctaagttagaaatcgcagcaattaatggctgatgataaaacttgttttggaaccaagttttatcatttggagattttccttttggatattcagcaattaaagatttattagctctttcaactaagtcttttaattgaggattgtttccaaaagttgcattaatgtaatttcttacatcatctatttttgcttttaattccaatgctccttttgaaggtgtattttcatctccttctctgaaaaaatattcagttgtagcttcattattgttaagcgctgcaaagttttcactcacgtcaacatcttttccctgcgcatctttatcgtgaaactctgatttcttcttaagaacatctttaatttcctgagcagattttaccaaaacattgatcttatctctaagaacctgatactgagcccatggctgcgcataagtgtccggaacctgttgagctttcgcttcaagagttttttcaaaaatcttttcgttttttctttcagttaaagttcttgtttcattaagagctttagtagagtcataatatgacctgatgatttccgcatcaatatttagggccatcatagcgatgaacaccaaatacatcaggttgatcatcttctgacgaggtgtctgttttcctgctgccattctcttttctttgttttttgattaagtagttaaattaaaaatggtttgggaaattaagacttcatagcagttaacataccgccataaactctgtttagattgtttaagtttgaagttaaaccttgtagttcctgattgaatttttctgattgttcagcagatttttgcatatctgctacatatttattagtaaactcagattgttttttagtgctttccatttgcattgcaaataaagcattcatgctttccatgtgctgcgctgctttatttaactgctcattatatttatgagtagaagcagaaacgtcaacagtctggttgatctggtctacagaacttgaaaatttatcgattcctgttcttaatctttcaaataactgaacatcaagtttagcatcctgaagcattttgtctaatttggttgaaagagaattttctaattcagcaaattgagcagagttgcttttagatatgtttgagtgtaatggatttgggtttgcgtgtttatctaataattcaggataaacgttttcccaagcataagactcctcagattttggcgggtcgaaagcgaaaatgatgaagatgatagcttccgtaataagtcccactgtaagggccatgtttccgttaattggtcccaaggtaatgtgagtaattttaagccaagctccaagaattacaattgcagcaccgaatgaatagaagaaattcatccaagcatctttagtcttaaacatataagttagttttttttaatgttaaataaaatttatcgaaaaatagtgatgattgaattatctgttaacttttcttggtttaacagcagcttcaggaatatcctgtacagttctgaatccgatatagcttcttgcagagtcttttctttcccagtctcttgcaccgttcataagcatatatcctacatctttccaagatcctcctctgatagatttcttagtatctgccaaatctttcgtagaaggatttaaagtagatgagaatccgtatgaagagttgttgtaatcagacgatgtccattcagaaacgtttccagccatatcaaataacccaaacccatttttcttaaatttcttaactggagctgtatatgtataagtaccttttttgtcgtcttccatatagttacctctcttaggtttgaagtttgccaggtagcaacctctgtcgtccattaaataaggacctccccaaggataagtagcattttgcattccacctcttgcagcatattcccactcgatttctgtaggcagtctgaactgcaatggtctttgttttcttctttttaagctttcgttataatcagatttcaatttagatctgaagttacagtatgctcttgcctgatcccaagttaccccaactacaggataatctttgtaagctttgtgccagaaatactgctcaaacaatggctcgttataagcaaaatggaaatcttttacccaaacagttgtatccggataaatagcaatactttcacttctaagatagtttacacctctttctttttcagccattgctacatccatatctccccatctgtaagtatattttaatttactaacgtcaaggattctttcattaccaattcttgaagaagctggtaaatacattgattctaaaacttccgcatattctacatccggatatttagatgtattccagtgcaaaggaactttccagtcgatttttttcgttggatcgtagtttccttcgtttccaccgccttgtccttctaaatattcctgatatggtgttaaattttcttctttctgtgcaaggtatgcataatctccgatgcttgttcctttacctttaccttcaccaccttctccggcagcttcagctaataaagttcttgcaatagaatctcttacataattgataaataccctgtattccgcattagtagtttctgcttcatccatgaagaaagaagaaacagtaacagtttttgccggagctttttcaggactgtttgtgaaatcctgatcagttaatcctgcaacaaacgatcctgcaggaatagctaccattccgtaaggtctttctgcaacaaatgattttgttttttctctaggtatcaattctccttttgttcccggtttacctactgaagaggctcccccacctgaacaagataccgatgctaccgacgcagacaataataaaagaaatatccttttcatgttaatttttataattaagccgtaaatatataatttttttaagaaacttttaagattttttttgaaataacggaagaaatctaaatttattttatttacaagtaatttttattccacagttacagatttcgcaaggtttcttggctggtctacgttagctcctctgtacactgcaatgtagtatgacaataattgtagaggcactgatgcaacgattggagaaaaacattctgatgtttccggaatttcaataacgtagtctgccattgcacttacctgcgtatctcctttatttacaacagcaataacttttccttttcttgccttaatttcctgaacattgcttacaattttatcataatgtccttttttaggagcaatgataacaattggcatattttcatcaattaacgcaattggaccgtgcttcatttctgcagcagggtaaccttcagcatgaatataagagatttcttttaattttaaagcaccttcaagtgcagccggataattgtatcctcttcccaaataaaggaaattggttgcactcacaaaatcctttgcgatattttgtaccagatcgtgagtcgtacccaaaacatcttctatttttttaggaatggcatccagttcggcaattaagctcataaattcggcgtttcctaaattcccattatgtttccctaatttaagtgcaatcaaagaaagaattgttaactgcgcggtaaatgcttttgtagaagcaaccccgatttcgggaccagcatgcgtataagatcctgcatctgtaattctcgcaatagatgaatctacgacattgcaaataccataaataaatgcccctctttctttagccaattttaaggcggccatagtatctgcagtctcacctgactgggaaattgcaattacaacgtctttatctgtgataattggatttctgtatctgaattcagaagcgtattctacttcaacaggaattctggcatattcttcaattaaatattcaccaataagtccagcatgccaagaagttccgcaagcaatgataatgattctgttggcatttttaaatttttcgatatgatcccaaattccagccattttgataactccttcatctacgagaagccttcctctcatcgtatcgtgaaccgatttaggctgttcgaaaatttctttcagcataaaatgctcatatcctcctttttcaatctgctctagacttaatttgagttcctgaatttccggttcaattttagagttctcactgatggttctgatgtccactccattttcaagagaaatcgttgccatatgaccttcttcaagataaatagcttctttagtgaattctacgaatggtgatgcgtctgaggcgataaaatattctttctcaccaattcctatcgccaaaggagatcctaatcttcctacaaccaatactcccggaaaatcttcatgcattactgtaatcgcatatgcaccatatacttcattaagggcatatcttacagcggtaggaaaatccatttcagtatttaaatccataaaatactgtactagatttactaaaacttctgtatctgtttcagatttaaatgtaaatcctttttcagtaagcatcgttttaatcgtatcataattttcaatgatcccattatgaacaagtgctacttttccgttattggataaatgtggatgagaatttctgtcgctaggaacaccatgtgtagcccaacgcgtatgtcccataccaattttcgcaactccttttaactggctggaaatgcttaccaaatcatctactttacctttggttttttcaacttcaagtttattttctgcattttcaagaacgattccggcactatcgtaccctctgtattctaatcttctaagaccgttaattacaatatcgtaagcgtcctgaaaacctgtgtatccaacgattccgcacatatttttatcaaatgtattttaaattattttgtaccgtaaattacttttaattgaaccctgtttgggtttcctgcctgcgaccccacaaaaacagctctacttgtattatatggtgttgtagtgaatttgtatcctgctaaactggttccatcagaattagtctggaatgatcccatatcaattttaaaatatatagtagcctttttagtagagtcataattactatcttccacaagatcttttactgatttagtaacgataaaatcgtaatatgtgggatttttatcatagtcaaaaatcttgtaaatactataattatcagaacccgctaaatttaatatatcatctgtaaaattagatattgtagacggcagacctgtagtcggattaatctttgccggatctatatatttttttaacaatgttaactctctcggcttagccaaattattattccaatctgtaggatctgtatatattctcactttagcactaattatagccgctttgtcgttttgatacaattgcttaagctgattaatagttgcatctggaattttaattcctattgatggacctcccattccttgtaaaaatagttttggagcaccattattttgatttccaattgtagccgacgcccatgcagaacctgttctgtcatattgatattgcccaatatgggtattagcggaccctaaagcaaatgaatatgtagtttgtggtcttgttgttgtaccgttttcagttttatcatacttatagtacataataagctccatatcgttatgtgaaatctggaataaatagccatcttcttcgtcaacagaaattctaaggcccttaaagtatcttatgaaatttgaagcatcctgaagttcaggctgatctttcttagctataattttactttggaaaaaatttttatccaacggaattctgattcccggagttgatgctgtaaataaagcagcaccaccatcatcttttgtaatggctacagaactcacatatcctttaaactgctttgatcccaaatctgcgcctatatcaaaagtctgattagatttggcactatcagaagcaccttttaagaatgtatttacttcatgaactcttaaattaaatgtttttttcgccttcccaaattttaaaacaggatatgtatttactacttttttagcattaacactcccgtcagcggctgtagtgtaagtataactatcatctactgtattggttgtaacactgtcagtagcgtatctaggtttcataaccaaaactactgagtcgactactgcatttgtcccaaaatcaggatcgtatgttgacagtctaagctgcgtcagataagaagctttctgcattccgaattgtccttcattgaaagcacctaagacagcatacgttaatttagaggcatcacttcggatactatcattattgtttatattgaatgccgtaacatcaaaagatttttcatttccctgtgcagcaccgtccagaaataattgctcccccaatgtatctgcatccggctcacaattataaagtaatgcacttccaaaaaccaccagagaaaaaacggtgattgcttttttaattgtatgaatcattaaaaatgtgttttttaataaatttggtttatagaatctacgtcaagatactccgatttaggtgtagaactttctttgaaagctttatctaagtcttcatctaaaaattcatcaccttttacaaccatatctacatagttcatgctttcgatcacaaaagattttacactcggattgtctaacgcttttaatcctgaaatattatcaaacttcagtttttcgtcgatattggaagctaaagatgcatctttctcattgtatagtgaaagaacgattttggcatccttaaaataagtatctgtttcgtaataggttttcagataaatcggaacaaaagaagccatccatccgttcagatgaataacatccggaacccaattcagtttcttaatggtttcaattactcctctggcaaaaaatattgctctttcatcattatcctcgaaaggctgtccttcatcatcaaaataatattgttttcttttgaaatactcttcgttatcaataaagtaaacctgaagtctttcccccggaagagacgctactttaataataagaggctgatccagatcattaataataatattcattcctgaaaggcggatcacctcatgaagctggaatttcctttcacttatctgtccaaatcttggcataaaaactcttacatcattgccttcttggtgcatcttaagtgccattttgtttaccactgcagccatatttgtatcttcctgatatggatacatctctgtagtaatgtacagtattttttgattcggcataaacttctatctaatttttgtaaaaatgctttaatgcgcaaaattacgaaaaaacattcattattattttaattaacatttttttacgataattccctttgtcaaattattaaaactaagacttcatgtatcataattatatgatatttttagtatttttgaattactattaaaataagctatggaagttctaaaaaataaaaaggttcttcaggatttcattgaaagacagaaagaaatgggcaaaaaaataggttttgcacctaccatgggagcccttcacgatggacatttatccctatataaatcagccagagaagagaacgatcttgtggtatcatcaatttttgttaatcctactcaatttaataatccggaagatcttgaaaaatatccaagagatatcaacagagatatttctattcttgaaaaatcaggtctggttgacgctgtttacattcctgaagttacagacatttatcctgaaaaaacagaaagtcagcattatgattttgacggactggaaaatgaaatggagggaaaatcccgaccgggacattttgacggtgtcggaacggtcgtagaagaacttttcagtcaggtaaagcctgataatgcttatttcggagaaaaagacttccagcaactggcaattatcaaaaaaatggttgaaaagaaaaaacttctgattaacatcaagggtgttcccatttacagagcagagaacggacttgctttaagttcccgaaaccaaagacttcatgaagacagaagagaagcatcttctgttatttatgagacattaaaaaaagtgaatgaatggttcagagtgattacagttccggaaataaaaaacagagtacaggaaatttttgatcatcaaagaggaatgcagctagaatattttctgattgccgatgaaaaaacactaaaagaaacagatttcttttataaggacagaaaattccgtgcatttatagttgtaattgtggatggagtgagactaattgacaatatgcacctgaattaatttaatcaaattcaaattatcttaaaataacaagcgttgctaaaaagcaacgcttgttatttttatctacttctacaaatgaagacagtagattatataaaaaatcaaaggcttcttacgaagcctttgaaacaccaaatcacaaaatattaatatgaaaaaaatttacttttcagtaaacttgtgacccggctgggattcgaacccaggacccatacattaaaagtgtattgctctaccagctgagctaccgagtcggtcacaattaatagactaaatataaaattaaaattttaaacttcactattaattattcaaattttctgcattgtgcctgcgactggactcgaaccagcacatccttaggaaaccaccccctcaagatggcgtgtctaccaatttcaccacgcaggcaataaaaactacaaaaatccagtaatctttttttgcttgtgacccggctgggattcgaacccaggacccatacattaaaagtgtattgctctaccagctgagctaccgagtcggtcactttatcaacgattaacacagtgataatgtccctcgtttttagtggtgcaaagatatgagttttttctttatctcaaaacttttttgcaaatttgtttaaaaaaaattcatgataatttcactggtcggatacatgggaagtggcaaatctcacatttccaaaatattaagcgataaactcaattttaaattaattgatctggataaagaaatttccaaaagaaacaaaatgacaatccctgaaatcttcgataaaaagggagaaatctattttagaaagctagaaagagagacattggaagaaattcttgcgtccgaaaaaaatacgattttaagtctggggggcggaactcctgtttactataataatatggaaatcatcaaccataattcaaaaagtgtttttttaagggcttctgttgctactttagcagaaagactttctaaacagaaggaaaaaagacctttaattgcaaatattactgatgaaaatcttgcagaatttatagccaagcatttattcgaaaggaatgatttttataataaagcacagatcagcataattacagacaacaaaactccggaagatattgtgaatgaaataacagaaaagctctatctctagagctttttgttaatcttcgttttcagagtcgtccccattttcgccaaagaaatcgtcccagtccgtaaaatctgaggcaatatcattttctacgtaatcgtccatatctctgcggtcttttttcgtaggtcttccctcacctttattccggtaataatcctgagatattttacgcatttttaacagctcatactgttccttatcagtaacatcttttatatgaagaggaacaagctttgctccaatcctgcttttaggaatctgaattactttaatttgatagtcaatctgatttttacggatcttaattacatctccttccttcacctctttagaagactttacaaccgacgcaccgatagacactctattctttttaatctcctcagtagcaatggttctggtcttataaaaacgaatgctccataaaaatttatctattctcataattttttatacttttgtcgttatattatttgtaaagtaattaaagttttttgaaaaatgaaaaaaatatttttatatatccttgctggatctctttgtttcacggcatgtaaaaaggatgatgaagttgaaacatttgtagaaccggaagatatctcggtaagaaattcatatgatgatcaggcgatccaaaagtttatgaatgataattaccttgattcacagggaaatataaaagcatttagctctacagatacttctgatgataatgagaaaaaattatctgagctgagtcctgtaaaactttcttccggggttatttatattgtaagaaacggagcacagccaacttcaggagtaactcttgaaacgaatcctgaagcaacaaacgccactcagatcagaacgatgatgagagcaaactattaccttgcaacaaataccgatggtaatgtagcatttacaacatcaggagttttagccaacacaatcaacggaagtggttctcctttaactgatccgttgttttattatgtgaagaaaaaaacaatgacggatgctacaactgatgctgccaaactaagaaaatactacgaaatagaaggtcttcaggaaggattaaagtattttcagggatatgcaaatctatcagacggagacgcatacaatttacagggggtaattatcgttccttcaagagctgctttcggaagagatacacactataattatacagggtattcactccaaaataattgttttgtattcaattttcaaatttacaaagctaatcagagacctgttctagaacaataaaaaataaagcgcttcccaataagaagcgctttttatttgcttaaaattaatacttagctttctgctttacatttcctaaaatatccggaaaatagagatctgctaaatgatcaaactcgtcacctctcataaacatcgtggcatctacttcttcgtaagaacttcttcctgccgctgcaatcagttcattgcaagtatgaagcgtatttttatgaaaatgatatactctttctgctttatctgtaacatccagacctttaattaacattttatcctgtgtggcaactcctgtcggacaattgtttttattacaccttaaagcctgaatacagcccaaagagaacataaatcctctcgcattattacacatatctgcacccatcgcgattgctcttaaaatgtcaagacttgtaagaacttttccacttgcaatcactcttaatttacttcttaaattataattattcagcgttctgttaacaaaaatcaaagcaggttccaaaggcattcctactccatctgaaaactcaggtggtgcagctcctgttcccccttccgctccgtcaatggttataaaatcaggataaatcttcaaaacattcatctgaacgcaaatatcttcaaattctttggtgtctccgatacacaatttaaaaccaacaggttttcctcctgaaagatctcttaactgctgtacaaacctcaacaagcctgccgcatcggaaaaagaagtatgtgaaggcggtgaaataatcgtcattcccggagtgacgtgacggattctggcaatttccggagtatttttaacagccggtaaaactccgccatgacctggttttgccccttgagacaatttaatttcgatcatctttacattgggtaaagtggaatattttttaaacaattccggattgaatttcccttcttcatcacgacagccgaaatatccggttccaatctgccagcaaagatcgcctccttccagatgatgcggagaaattcccccttctcccgtattgtggtaaaagtttcctttttttgcgcctctgtttaaagaaatctgagcgcggtcgcttaacgccccgaaactcattgccgaaatattaaataacgaagcatgataaggctgagaacactgctctcctcctacccagactctcggaagctcttccatcggagattttgcataaatggaatgcttaattccttcatattttctgtggttaacttcgagctgtgttccgaaaggcaccgtgtcacttaaatttttggctcttctgtacaccgcagaacgctgatttctcggaaaaggttttccatcggtttctctttcgataaaatattgctgcatttccggggaaatactctcaaaaaagtatctgaaatagcccaaaacaggaaaatttcttagaatagcatgtttagattgggtaatattataaattccgattgcatacacaatagttaacaaaacaggaatccaccaatctgcccttattaaaaaagcaaccgaccacgcaacgacgagaataatagctccccaaagcaaaaatttgtctctcatatcattttgaattttaccaaagttaaaaaatttaaattgatataaacggcttgagaaacatcaaaaacactaatgaaagaatttatttttggattaaatgtgatgatttcaggtttcgatttcattaaaacaaaaaaagacatcactctgatagcaatgtctgaattattttaaatgaattgtttaaaagaatattaaattttctcaagaaaactttcaaaagaattcatcacagaaacggttccgtccgcttctattttttcaagctttaagaattcaatctgattgactgaagcctgatcgaaattcttctgaaccctcacataattctctgtgaagccaaacatttttccgtctttgttttcgtgttcccaaagtacaggaagtgtttttccaagctgagtctggtaaaatgccatctttttcttttcagataaaattctaagcattttattgcgtctttttctttcgggaatcggaactacgccttccatttctgccgcttccgtattttccctttcagaataggtgaaaacgtgcagataagttattggaagctcattcaggaagttatatgtttccataaacagttcttctgtttctcccggaaaaccgacaattacatccacaccaatcgctgcatccggcattacctcacagattttattgactctgtcggtatataatttcgttaaataacggcgcttcatttttttcagcaattcatcgcttcccgattgtaaaggaatatgaaaatgcggaacaaagcttttgcttttcgaaaccagttctatgctttcgtctttcaacagattcggttcgatggaagaaatacggattctttcgatgccttcaacctgatcaagctcagaaattaaatctaaaaaagtatgttcgtgtcttttgtttccaaattctccttttccgtaatctccgatgtttacgcctgtaagaacaatttctttgatgtctctttcagcaatctctttggcattttttaatacattttcgatggtatcggaacgggaaattcctcttgccaaaggaattgtacagtaggtacatttgtaatcgcaaccgtcctgaactttcagaaaagctcgggttctgtctccgatggagtaacttccaatgaaaaaatctgtttcttcaatttcgcaggaatgaacgatgccttcattttcagatttctccagatcatcaagataactcagaatattgaatttttctttggctcctaacaccagatctacgccttcaatctgtgaaatttcctccggtttcaactgtgcataacatcccacgattacaaccagaccatcaggattggctttcatggctctttttacgtgaagtttacattcgcggtcggcattttcagttaccgaacaggtgttgataacatagacattcgacttttcatcaaaacttaccttatcgtaaccggcttctgttaattgacgggcaatggtagatgtttccgcaaaatttaatttgcagccaagagtatgaaatgcggcagttctttgaaattgagacatttattgattctgaattttgtgggtgcaaagataatcattttaagatgaattctgaattgattcagtctattgattaaattcatcccttatttccggactgttctggtaacaaaccggagatgaattatgaatttcaggttcatcaatctgctgcaaatctctgatacattgttctctgattttccacaattcatctaaactgtaagtgatgcgttcttcattcagccacttttcaagaaattctttgtgaaatgaaattttctgagtgccaatttcgttgaattctatttccttttcaatcagcagtttatctttaaattgatgataatgtgagctgcggttcgtaaaatcgaaatattcgttatcaattttgagataattatgcgcttccggaatgtattttaaactaaatctttgcaaagtacgggtaatcttcggagtgtattctgcatccattttaaatattccaagaatgagttttacatcgctatgatgattttccagagcaagttttctcagggcggcgtgttttgtactgcaggttccgccaaaatcatcaaaaacacattcggttctgcttttatcattatttcttttgtaagggagcattgaaatatattggcaggcagaatgaaaatctgtaatttttctatttaaaaattcatcagaaataattcctttattttgaatggtaaagttcttcattactgctgtctgaatttactgatcatttcagaattaaattcctgcgatttgtttctcggaatagaaagacttttccagtcttcattcttcatcatttttgcgatatatacaatctgcccgatatgataaggataatgcgccaactgacggaaaaaggcatccataaacgtatgtgcttcatttcttatataaattacggaatgtatattttcatcattcatctggttcagagcttcaaaaaaaaatttccagcctttttcccaatattccagaacctcagctttcgttttaaaagtatcaacaaattcttcatccctgttccgccatgatttttcgccgtcttcggttaaaaaattagtccatctggataacatatttccggcgatatgcttaacaataatggctatagaattgctttcttcattaaactgccagaaaatctgttcatccgaaagctgcccgaaagattgatctccgagcattttgtaatattcaaaacgttttatcaataaatccttcatgatgtaagtttgaatatctaagataaggattttacaaaacaaaaaccgttacacaggcaacggttttctattgagttctgaaaattattctctgttttttaccattacccaacctgaatacttgaataaggtgctcttcttatcattttcgttccaagaaaccgaataccagtaagttcctgttgggacttttttgcctccgatggttccgtcccacgtataatttctgaatttatccgccttaaaaacaagcgttccgtatctgtcgaaaacactcaataccaaattctgtttgtatcctaaagctgaataatcgatcacatcatttactccgtctccgtttggtgtaattacatttaccaaattaggaaccaccacagtaatatcaatcggttcacaattgtaggcatcttttacaaaaactctgctgtctcctctcggaaggtttgtaaatacgttagaatcctgccatttgattccgtcaagagaatatttgtacggagcggttccacctgaaacatttaccgttatggtattgttggtaatatcaactgatgaaattaccggctgttccgaagcatacacttttacactttgcttggtaatacagtcgccactttttaatttcacccaatacgttcccactcctacattattgatggtctgtgttgttgcacctgtactccactcataactcgtaaatccggaacctgcatccagtgtggttcggtcttccatacagatgattttgtctttcaggacattggaatataccggctgaatgactactaaattcactttcgcaattgcaaaacaattgttagaattaaatactttgatgtaaataacgccatttggagcgatgtaatttgagaataatacaatttcattggttccgttttgggcatctgctaaagaaggataatattttttagtcgttccgctttgtgtggtgacggctgcaagactgagattaaatgctcccgttgaaggattagcttcaataaagcaggttcttaaagtgacctcggtaaccacaacaaccggataaaatttcagaataatctgtgcaatagctacacaaccatattgagaagtaattttaacatacaccgttccttctgccgaaacgaaattagtggtgttcgtaatgggatttattcccgcattaagatctgaaagtgaattataataaaccttcaccgcggtaggatctccaaaaacagcagcggaagttaaatcgtaagttccggttccggcattgttgttattacagctgtagagcgtaacattggttcctgaaatatttccgtatttaaatttgaaagctcccacctgtctgcaggaattgatcgggttattcgggtttgcaggatcctgataatggatactgtaataatatgttgtggcagtattaatggtaatcggcgacacaataggatttgctccggaaagtgcttcattctgtgaagtatgataactgatctggaaattgctgttgccattaagaataccggaagacaaggtactgaaattaaaaaccatgggattttcgcagacaataatttctcgcggattggcaggattggcagccggaactcccggcggagtaaatggatgagtctgaatattaggatctgtaaacggcgaagccagtgttgccgttcctccccaatttagagaaaacggagccattgtaggattaaaaacatctacccagttatctatatacaaatagtaagtctgccccggtaaaacatccatatatttacagtaaggcgttaacgatcctcctgcagcactaatgatggtgctcgtcatattcatgcctgtggaagctccaactccgataacggtggctgcattacagcgaaccggagaaccaagacttgcacagttcacattcggtccgtaaatcgcccagtcgtaatctgctcccggatctgtaggaacgagatcgaaagtaagcgttccgcctgttgcaatggtaaatttacaccagattgaattgtgctcaccggaagataaacatcctcctaaattttcattaacggccccgattcccgtcggagaatacgttatactggaatttccgcataccgcaagtgctgatgaacagtctgcctgagcgaaaataaaagatgaaataaaaagcaagaaaagaagtagagtttttttcatatcatgttgaatttggttattaatttgtgcggtaatttgctgtctatcaaatataaacaatttcaattaaaaataacagattcaacaaaaataattcaataaaagctgattaaaaatgaaatattttcagctactacttgatacttgtgatatttccgcaaagattttcgagatgaaaaatcttgtgaaaagggctttttaccttttgcagatgttctttatcctgaataaaagtataacgcgaagcgatggaattcatatccgaaacaataacgagccaacattcgtcgaccgaagtatcgtagtaaggaaatttttcgttctttttttcaatcagctctacaattttctcagaacataattcatcaaaaagattcatattgtattcatgggtaataaaaacatttctacggtggaaagactttcggattcctttcacatttcctacaggttttccttttttgatgcttttacagatatttaaaataatttcctgctgattttccagagaatccagttggatgtttgagtgaaattctaaaaaataaacaccacgaaatttcgtagtgtcttcctgttccaataatatttctgcctgacggaaaatcttgttcagattgctttcaactttcttcatttcaagatgattgatcacttcggtaagttcgattccgattttcttgtcgttgaattttgcgataaagtcgggactttcgcaggttaaatcttcaaatttaacttcagggaaatgatgcataaaggagttgagcagtaaaatttccgctttctttttatatttttcgcggtcgtgaagcggagattcgtcgatcttacggtgatacttttctatcggcttctttttcaagtgtcggttcagataatataagctcagatttttaattaaatcttcatcagaaaatgcctttttcatctgcttattattttattgttatggaagacataaaacttccagtttcagatcatgaagttttgattatcaaaaatttacacattaaaggtaaataaaaaacagattcaaaaagtatttttaatgttaatttataaaataattaatgtagagtttattttcataattaatacctttgcctcctcacttaataaactgttacacatggattttaaaaattttaaaataccttttagcgtaaatccgcagtattccaagaaagtggcttatttttctatggaatttgcgattgaacaggtgctgaaaatatattcgggtggattaggatttctggcaggttcccacatgagaagtgcttacaatctgaaacaggatcttatcggaatcggaattctctggaaattcggatattacgatcaggcaagaaatcatgaccagacgttacagccgacatggacgaagaaaatgtacagctttctggaagataccggcataaaatttcagatagaaattcacagcgctccggtttgggtaaaagtatggtaccttgatcctgagattttccacacggctccaatgttttttctttcaacagatgttcctgaaaatgaccacatttctaaaaccatctgtcataaactgtatgatgccaatgaatctacaaaactggcacagtacattcttctaggaaaaggaggagctaaattgctggatgaaatgaacattgaaagagatgtttatcatttaaatgaagctcacggacttcctgcagcgttccatctgctgaaaaaatacaacggaaacctgaataaagttaaagaaaagctggttttcaccacgcacactcctgaagaagctggaaatgaaaagcacaatatgagactatgttatgatatgtcttatttttcaggcttcagtatggaagaggtaaaaaatatcgaaggttctgatgacgaccgtttcaaccattcactttgcgcgctgaaaatggcaagaatagcaaacggagtttctcagcttcacggagtggtttccagagcaatgtggagcaaatatccgggaatctgtgagataacttcaattaccaatgcgcaggaattcaaatattgggcagacaaaccgctttataatgcaaaagacgaaaacgacgtaacggttttcgattaccgtaaaaagcatctgaagaaaagattatttaaaatcgtagccgaccagaccggaaatttattcaatccaaatgttttcactattgtctgggcgagaagatttgcaggatataaacgtgccgatttgcttttacacgataaagacagattctacaaactgttgaatcatcctaaatatccggttcagatcatttgggcaggaaaaccttatccgatggattattctgcaatttctacattcaattctctggtggaggaaagcaaaaatcataaaaatatggcagtccttacaggatatgagttgtctttgagcaaatctttaaagcagggttctgatctttggctgaataatccgagagttccgagagaagcttccggaacctccggaatgacggcttccatgaacggttctgtaaatctttccacagatgacggatggatccctgaatttgctaaacatggagaaaattcttttgtggttccgaaagcagattatgccaacatgagcatctacgaacaggataattatgatcttaacaagttatatgaaattctggaaaatgaaattcttcctacgtactatgacaagccggatcagtggagaaaaatccagtacaattctatgaatgatgtgaaagatcagtttaacagcgatagaatggcagatgaatattacagaattatgtataatgattaaagttaattgttaattgttaattgttaattgttaattgttaataagcttttaaaccgttaaggtcgatttaagaagttaagcattatttaagttttggtgacgctacattaaaatcagatatgattcatcttaatctggcttaacttcttaaatcgaccttaatggttcaaaatatgaaacagacaaggcttggaaaaatttcccaagccttgtttatttaggttaatcttttttctttttagggacttttaagccctcctgtttctcttcagaaataccaatggcgactgcctgttttctgctcgtcactttttcaccggaagaagatttcagttttccttccttaaattcgtgcattacttttcctattttatcctgagctttttctgaatattttgtcctgctcatattatttatttttaagatttaggtaaagacacagcaatttcatacacttgggcgtgcttcagatatttagagcgctctcttgaagtcaccgattcaaaatgatcattttttatcactacaatcgggtcttcaatgttttcgatttcaaaattggcgatgtatctttcatctggtggagactgttgctgtttcgctttaatcttctgtaattcatcggcatattttctgaatccgggatctgaagaatggataaatttatattcatctcccgcgtctacgaaataatgcaattttttttctatcagtccggcttcattacagatttcagggttatcatttccgtctttgaagcccacttcaaccagttctcctccttttttatcggcacattcttcggcatctttgtaacttgaaaatccggtgtatactattttatcttccagttcgtatcggttcagtttttggttaaaagcattcgtttccataattatattttaatttgattgtatcttaatatatccaattttactgccaaaatcagagatttaaaaagctttttttaccattttaaaaattattatatttgaaatcttttaaaattagaaatgaaaaaattcttactaacgcttacagttgctgtggcatttcaaagtttatccgctcaggaaattactttagataaaatatattcaggatattaccgcggaaaaggcattgccggaattacctccatgaaaaacggtgaaaattatctggttatcgaacagggaggaattgcaaaatattcttacaaaacttctcaaaaagaaggaaaccttgtggacggacagttccagagctatgaattttctgatgatgaatctaaaatcttattactgaaagctagtgagccgatttacagacattcgtttttaggaaaatatgaagtaaaagatcttaaatccggaaaaacagtaagtcttaatgacggaaaatttgttcaggagccaagattttcaccggatgctacaaaagtggcttttattgcagataacaatcttttttatcaggatctgaattcaggaaaaatcacacagattacgcagcatggtgttaaaaataaaattttaaacggacttgcagactgggtttatgaagaagaattcggacacgcaagactgtacgaatggacaaagaactcggatgcgattcttttcgtaaaattagatgaaacggaagttccggaaatctatattccgatttacggcaaaacgctttatccaagcgaaatgcgttacaaatatccaaaagcaggagaaaaaaactctgttgcttccgcgcatatttatcagttgagtgacggtaaaaagacaaccgtcaatttagacagtttcaaacattattatattccgaatgttattcagacggcaaaaccggacgaaattgttttgattacttcagacagaattcagaatgcttctgatgttttaaaagtcaatacaaaaaccggagctgttcagaaattgttcacggaaacggatgaaaaatggatcgatacagacagcccgactttagaatttttagaggacaattctttcctttggggttccgaaagagacggaaaccgccatttgtactggtatgacaaagatggtaaactgaaaaagcaggttacaaaaggaaactgggaagtaacagattattacggatttaatcctaaatcaaaagaaatttacgttcagactaccgaaaaaggaagcatcaataaagtgatttctaaggtaaatatcgaaaacggaaaatcccagttgatttccaacgctgaaggaaataattctgccaatttcagcaaaaactataattatttcatcgaaacttcttctacggctgcaaaaccttatacttatgttttaaaggacggaaacggtaaaacggtaaaagaacttcagaataatgaagctcagctacagaaattaaaagctgataatttcgtagaaaaagaatttattacaattccgaatgaagcgggagatcagatgaatgcatggatcatcaagcctaaaaactttgataaaaacaaaaaatatccattgtttatgttccagtattctggtcccggttctcagcaggttgccaattcatgggacaacggaaacggaatatggtttgaaatgcttgctcagaaaggatatatcgtagcttgtgtcgacggacgcggaacaggttataaaggagctaaattcaagaaagtgacatacatgaatttagggaaatatgaaattgaagatcagattgcggcagcaaaatggttcggaaatcagtcatacattgataaatccagaatcggaatgttcggatggagtttcggagggtatatgacgagtctggcaatgacaaaaggagccgatgttttcaaaatgggaattgcagtggcaccggtaacgaactggagatattatgattctgtttacacggaaagattcatgagaacaccacaggaaaatccggacggatacgataaaaactccccgactgaatatgcaaatttattgaaagggaaattcttattaattcacggaactgccgatgataacgtgcacttccagaattccatggaattttcggaagccttgatccagaacaaaaagcagtttgattttatggcttatccggataaaaaccacggaatttatggcggacagacaagaccgcaactgtatcagaaaatgactgattttattttggagaatttataatccaatgttttagcataaaaaaagccggatctaaagtttagatccggattttttattagtaaaaatgaaagctcctattatcaataatcgttacgagaaaaattttattgtttatttcctgatagattagagaattgttttcatcaattatacattttcttaaattaagtatcttagattttgggcaaatcgcagcattacttttcagattatcaatcaatctattaaaatgattttcaaatctttcgatttctttaattgtccagttttcaaacaaataatcaattacctttaaataattctttaaagtttcttcagaccaaataatttccattattatttctttgaagcaatataatctttgattttcttctgagcagattcatgacttaaagttctgtcgttttctatgtcatcaactcctttttttattgattctctttgaggctcggatattattcccgaccaatcattttcatctgttctgttatattttgtcttcaaaaaatcaataaaatcattcacttcttcataaaaattttcagggagtgttctgatgttatcttctaaatcttttaacgtaatttccattttcttcatctttatttccatcaaagttaataaaattcgattattatttttaaaattctatatttgtgaaatttgaaatttgtaaactatgaagactaaacatcctaaaggattgcctttcctcttctttacggaaatgtgggagcgtttcgggtactatcttatcctcggaatttttgtattatatgttattgaaccaaccggcgcaaaaggtggtctcggacttccggacaaaactgcagacgatattttcggaacctatattgctttaacctacttaactccttttatcggaggatttcttgcggacagagttttaggatacatcaaatccatttacatcggaggcgttctgatggctgcaggatatatcggaatggggatttttaaagaccttactttattttattcttctttagcactcattatcatcggaaacggtttctttaaacctactatttcaactttgcttggaaatttatattccgaagaaccttataaagccaataaagattcaggatacaatattttttacatgggaatcaatatcggtgcatttatctgcaacattattgcggcattcatgcgaaacaaattcggctggggtgaagccttcatcaccgccggagtcggaatgctggtcggattaattatctttaccatcggcagaaaacactatattcatgccgctcagatgaagcctgttcaggaaggagataccaaactttctgaaatattaatgaaagtattcttaccggcaatcattgcaggagcaatcggctgggttattcccggaaatatattcggaagcgacaatacagatgcctttatttttgcctgtgttcctgtcatttacttctatgcttccctttatttcaaggcaaaaccggacgaaaaatcgtctatcggagccttattatcagttttcctcatcagtatgttcttttgggcagttttcaaacaaaatggaaccgctttaacgagatgggcaaattattacaccgacagaagtgtacctgcttccatggaaaaacctttggaaagcatttacatggtagacggaaaaagttatgaagacaaagaagttccggtttatgatgaccagttccagtctcagaaagataaagacggaaacacaataaaagttcagggaaaagatgtttattttaaaaatatttcttctgaacaacgtgcagaactggaaaaaaatcctcaggctaaaacctatctttacaatacagaattgtttcagtcgatcaatccgttttgggtaattgctttaacgccggttgtagttggtttctgggcattattaagacgaaaaggaaaagagccgttaacgccaacaaaaattgttttgggacttttcatttcaggattatcctgtttagtgatggttttagcagtctgggcaggagataacggtgctgtaaaagtttcgccgtggtggctggttgcaagttacggagtcattaccgtgggagaattatgtctttcaccaatgggattatccttcgtttccaaactttctcctgcaagaattacagcgttgatgatgggcggatttttccttgccaactccgtaggaaacaaactttccggaattttagccagtacgtggtacaattacgacaataaaatgaattactttttagtgaattttgctttgttgatctttgcaacccttttaggtttatccatgctgaaaagactaaacaaaatcatgaaagaaaaagggcattaatccctgttcacaatacagaaaatcaagctgcggaattattctgcggcttttttatttaaatataaaattaaagccttgctgaaaacacaaaaaaaactatatttgtcagtcttaacaaaaattaacaataaaaatggataatactgaagcattaagtccgaaaccggatgaatttgtagagaacaagaattccagacatccgaaagggttatgggttcttttcggaacagaaatgtgggagcgtttcaacttttatggaatgagagctttattaacgctcttcatggtaaattccttattgataaaagaagctgatgcagcaatcatctatggtggatttttagctttatgttatcttactccccttttgggaggtttcatcgccgacaaatatatcggtaacagaaatgcaattcttatcggaggaacattaatggcaattggtcagtttttgcttttcattagtgcttctacgttttcgggaagcttagacagtgcaaaaatgtttatgtggcttgctcttttcatcatcattttcggtaacggatttttcaaaccgaatatttcttcgatggtaggaagcctttatccgaaacaggaaaaatctaaattagactctgcctttacgattttctacatgggaattaacattggtgcattcttaggacagtttatctgtccgtacgtaggagacgtaaaagatgcaacaactggtgtaagagatattttcgccttcaaatggggattcttggccgcttctattgcaatggttatcggtaccattacgttctttattcttaaaaataaatatgtagttacaccggaaggaagacctatcggtggattacctaaaaacaatacaagcgcagattttgaagaaggtgaaacacagacagctaaattctcaggatccgctttaggaattacaggaggattattcgttattcttttctttgctttcagatatcttttggtaggagaattcgggtttaaagccgtagaaatgggacagcttattaaaggaattatttatcctttcatttatgcagccggaatttcccttgcattcttaattatgagttctgccgaaaataaagtggaaagacagagaatctgggtaatctatatcgtgtcattcttcattattttcttctgggctgctttcgaacaggctggatcttcattaacatttatcgctgataatcagacagacagaaacattttaggatggaatatgcctccttcaatggtacagattttcaacggtattttcgttgttgctttggcggttcctttcagtttgatctgggacaaattaagagctaaaggaaaagaaccggtttccccgatgaagcaggcaatgggacttgctctgatcgcattaagttacttcatcattgcacataacgtaaaagatttaggaaactcaggattattggcaatcaaatggttaatgttactttatttcattcagacttgtggtgaactttgtttatctccaatcggattgtctttggtaggtaaactggctccaaaaagatttgcatccttattatacggagtattctttatttccaatgctgcaggttatgctttagcaggttctttgggtgcattgattcccgcaacgggagataaattctctaaggcacaggaaatgggagttaatcttcaggatgttttagataaaaaagtaacgttaactgcagatcaggtagctgctttcgaaaaggcacagttgccgttggcaaatccgacttttgtaggatttgagatccacaacttatttgaattcttcatggtattcgttgttctttgtggtattgctgcagtaatattggcgttaatttcaccaatcttaaagaaaatgatgcacggtgtaaactaatccgcatcaaataaaataaattaaaaacctccgctaagtcggaggttttttatattttagtatgttcatccgttgagacgtcactgtgatggattacatagactgaaaatataattaaaatttaatcatataaacaattatgagtttaactttagacgaaatacagaattttaaagggaaatatccaaaacagatctggagccttttcttttccgaaatgtgggaacgcttctgcttctacggaatgagaggaatgcttgtctttttcatgatctcgcagcttaattttcatgaaagtgaagccaatcttcaatatggtgcaacgcaggctttcgtctatgcttttacctttatcggagggttgtttgcagataaaattttaggtttcagaaaatctttgttttggggtggacttttaatgattgtcggaagtttaattcttgcaacagatcctcataagtttttctttctgggaatcgcgtttactgtagtgggaacaggtttctttaaacccaacatctcatcaatggtcggtcagctttataaaccgaatgattcaagagcagatgccggattttcgcttttctatgcaggaatcaaccttggtgcattactgggaggatatttttgtattgccatcggaaagggagagatattatcaggtgtaattcctgaaatattaagatggaatattgcatttggattagctgctgtggtaatggtcatcagtttaattaattttgtttttacccagagaagcttaggaacgatcggatttcagcccggtcatcctgaaaatgaggtaaagtcctcacctatcccaaaatggcaggaatacggagtatatgcattgtctttaatctttgttccgatcatcatggtaatggttgccaaaacagaatatacagattattttatgtggacaataggaccgcttactctgatctatttattttatgaaatgaccaaagtaacctctgctgaacgtaataaactttgggcagcactagtgttcatcctgttttccattttattttggggaatttatgaacaaagcggaggttcgttaagtattttcgcggcaaagaatttaaataaagatctattaggattagatccgaatggcgttaataattccggaggtgcattctttattatctttttagctcctttaatcggattactttggatttggctgggtaaaagaaaaattgaaccgaataccctcattaaatttggtctcggattcattttcttaggtttaggatactatattttgttcgcaacgagactttttgccaatcttcaggggattacctctcttaatttctttaccatcgctttactcgttatcactctgggagaactatgcctctctcctatcggattatccatcatgacgaaactttccacgaaaaaccttcagggaatgatgatgggaatgtggtttctggcttcggcttacggacagtatgtggcaggaattatcggggcaggtttggcgaccaccaaagaaggttctaccaactatgatgctttgatcacttataccgatggatataaacaattgggattatacgcggtaattgccggagtggtattaattttgatttccccgcttgtgaaaaaattaatgcaggatgtaaaataaaaataagtaaatgcttacatttacttcaaaaataccaaatcatgaagaaaattataagtttaatagcactctttttagtcactttcagttttgcgcaggtaaaatggatgacgattgaagaagcactgaaagcacagaaagaaaatcctaaaaaaattctcatcgatttttacgcagactggtgcgctccgtgtaagatcatggataaaaaaacatacggacatcaggtaatttctgatatgctgaatgaaagttattatccggtaaaattcaatgcggaagataaaaaggagatcgaaatttttggaagaaagttttctaatccgaatacggaacataagaaaggaaaaaattccttacacgaatttactcagtatatgaatgttgcagccgttccgagtacggtttttctggatgaaagcggtaatccgatcaccattttgcagggagaattatccgcaaaggaattagaaccttatctggaatttatttctaaagatcttttcaagaaaatccgttcgcgggagcagtgggaagattatcagaaaaaatttaaatctaaaataaaagaataaaaataaaggctttcagcaatgagagccttttttaatttctaatttttcccgaaattcgtggctcctaaaaatgaatttagaaacctccatagaatacgtaaaaggaatcggtccggaaaaagcaaaactcatcaaaagcgttctgggaatttccaccgtggaagatctgctgaacttctacccgctccgttatctggataagagcaaagttcataaaatttcgcagcttggagacgtttccacagacgtgcaactgaaagggaaaatcaccaacgttcaggaaatacagaccggaaaaaccaaaaggctttcggcgaaattcaatgatgatacaggatcgatggatctggtttggtttcagtattcaaaatggctgaaagaacagcttcctgtgaataaagaagtttttattttcgggaaaatcaatgttttcaacaaccagttttctatgccgcatcccgaaatagaaattgaagaaaagaaagattccgaaaaccgtttaagacctatttatccaagttcggaaaagctgaccaaaagaggactgaatcagcggttttttcaggttgtgttacgaaatgtatgcaaagaaatcccgaatcttatccatgagaattttccggattatctgatgaaggcatttaagtttttatcaaggcagcacacctatctcaatattcattttccgaaggatatggagtattttgagaaagccgattaccgcttaaaatttgaagaatcatttttctttcagttaggattcgggctgaaaaagcttcatcataaaagccataccgcaggaaatcctttccccatcgttggagattattttaatgatttttacgaaaatcatcttccgtttgatttaacgggagctcagaaaagagtactcaaagaaatccggatggatatgaagcgtccgatccagatgaaccggcttttgcagggagatgtaggttccggaaaaaccatggttgctcttttaacgatgcttatagcgaaagacaacggtttccagagctgcatcatggctcctacggaaattcttgcccaacagcattataacggaattaaagaacttttagaaaagacagaagttaaaatccgccttttaacaggttctacaaaaaaatctgaacggaataaaattcatgaagaactggaaaacggagaactttctattcttgtgggaactcatgctgttctggaagataaagtaaaatttaagaatctcggcttggcaatcattgacgagcagcatcggtttggtgtagcacaaagagcaaaactttgggcaaaaaataaaattccgcctcatattctggtcatgacagcaacgccgattccgagaactcttgcgatgagtttttattcggatcttgatctctcggttatcgatgagcttcctgttggaagaaaacccatcatcacggctcacagaagggaaaaagaccgcgcttatgtttataatttctgccgcgaggaaatccagaaaggacggcaggtttacttcgtttatcctttaattgaagaatctgaaacgttagactacaaaaatctgatggaaggtctggaaaatgtgatggataatttcacacactataacgtagccatgctccacggaaagatgaaaccggatgaaaaagatgctgccatgaattattttgcctccggaaaagcagaaattatggtcgcaacaacagtaattgaagtgggtgtaaatgtcccgaatgcctcggttatggtcattgaaagttctgagagattcgggctttcccagcttcatcagcttcgcggacgtgtcggtcgtggtgcggaacagagctattgtattttaatgacttcggacaaattgtctaaagacagcagaacacgtattaaaacgatggtggaaaccaatgacggctttaaaatttctgaggttgatatgcagcttcgcggtcccggagatattttgggaacccagcaaagcggtgttgtggattttaaaagactggaccttgtgaatgatgctgccattattaaggcaaccaaaaagacggtggaaaaaatactcgaagcagatccactattatgcagaccggaaaaccagattattaaaaatgattatctgagaaattacaaaggaaaaaataaatggagtaaaatctcctgaaaacaaaaaaccgcgaaaagatcttgtcttcacgcggttcccccttataaaactgttatttgaagaaaaattactttacttctttaaaattcacataagcctttcgcttaatattttgtgatgtggtgtgatgaatatagtaattgtaatgatgtttaagcttaaaaaatgatgtaaaaaaaacaaaatgaattaagtttccaattgcttatttataaaaactaactaggtttctgacaaaggatttgaaaaaatgaaacgatatattctcctttggcagtactaagttttcatgattgtaccgttttgtttaaagatcttctgcgcttttaattggaaattattataattcattttgtttaactaacattgtgatttatataatttttttcaaaaactgaaacaattttcattcttcatttatcgttttttgatatgataaatctgtgttccaatttcggtaatttctcaagagataatcaatgtattttctacttaattatcacctttgtgtgagtattactttacaaatataaaaatttaattttaattccaaaataatttaatcaaatttttcacactttcatgataaaattatttttattgaatcctgaagtgtgatattgccagtttatcgcgataatctcactcacttttttcttcatatctgtataattatcaggaagtttcataataacattaattccttttaccaaaaaatcttcttcttcgtcattcttaaaattttccgaataaataacaatcacagtatcattaaatttcatatgtgattgtattactgaaaaaaaatcaaaatcgtcttttgcaataatatctttattaatccaaaacatttcaggaatcaaaatatcttcttcatccaacaaatccatcacacattttatcttgtgaaaagaatttgttttaagggcaatttttgaatccgaaaatatattttcaaaaaagattcgttttccttcgtcctcttctacaagaattatattcagataatctttggtcatacagccttcagatattgttcgttgatatgggataattttctcctcagcgaaataattttctggaactgagaaggtgtcattcccgttgtatttttaaactgtgtgctgagatgtgctacactggaataatttaagcggtaagcgatctccgtaaaactaagctttttactgataatcaattcttttgcaaactctattttgcggataataagaaaattttcaatggaagtatgcgtaatctccgagaacaggttcgaaagatatccgtagctgtgattgagtttttcggcaatgtaaatggaagcttttacagagattccttcttcggaagaaataagttctacaatggcatctttaattttttgtaccaacgcagccttttgattttcaattatttctattccgtaatcttcaaggttttttttaaaattcttgtgctgttcttgggtaagagattcatagaactctacttctccgaaattcagaagcctgtatttaagaccgtgctcccgaagtttctcgtccagtatctttttgcagagggtattgaagtcaaattttacatacattttcatcttttatatatcctttaatgtttcaatgtaaatataaaaattttatttcaattaaaagtgaaataataaaaatctgctattttttgcataaataaaaaactcctgcattattaaatacaggaatttaaacactaaggatgaaaaaaaatatactgataaaaagccaataaagcttagcaccaagcatatgaatgtacttttgaaggtgatttggtacagcaaagatgcgaaaaataaataaatcacattttatagaattatgtttaagatttataaaattccaatcttcttttctttaaagcttgaattccatcaggtaatcatccattacaaaaccgtctcctatatccagaaccacctcatcatatactttaaatccctgagattcgtagaaatgtttagcgttattatctttattcacattcagaataattcttttatcattactctcagaaattttctgctttaaaaagttcagggctccttttccaaaaccttttcccttactttccggaaccagatagattctgtggagctttgtggtagcatcttcgtaaccgttttcatatcccatgaaaccttcaaaagaatgattattttcatcaaaaattaaaaaataatgataatccggattctttaaatgggatgaaatctcctcttctgaatacattttctccaacatataattaatctgttcattcgagataatccccttatatgcactttcccaggatcttcttgccaaatcctgaatcatcggaatatctttttctgtagcttctattaatttcatttaattacattttaaaaattgaaaaaggtgaaagaactgattctttcacctgatattttggaatgctttaaaatgttactgtgaattcaccattcattataaagcagattaataactttcttttaaatatttgccatttcagccttaattttagcatgaagcccttctgaagcagctactaaaggaagtctcagataatttttgatgattcccatttctgccagaatcactttaattccgcaaggatttccttcagcaaaaatcagtcttgtgatctcaaccagcttgttatggatttcgtaggcttcttccacttttttatcaaaagccaactgaaccatggtagaaaattctttaggatacgcctgtccgattacagaaattacccctgctccacctgctaaagttacaggaagcgtatattcatcatccccagaaaccagattgaaaccttccggcttctttcttaaaatatcgaaatactgaagaatattcggagccgcttctttaatcaggaataaattagggaactctcttgccaaacgcagtgttgtttctgcctcaacattttgtcctgttctcgaaggaacgttgtagataataatatttttcccggttgaagccaacattttataatgctgataaagcccttcctgattgggtttgttgtaataaggagaaacagaaagcactgctgtaaattcagaaagatctgcttcttcaatctgtttcttcacttcaagagtattgtttccgccgattcccaaaaccaaaggaacccgtttattattaaccttaatgatatgctcaattacctgtttcttttcctcagcagaaagcgttgcagcctccgctgtagttcccaaaacaactaaataaccggttccgttttcgatattatagtctaccaactttgttaaactatcaaaatctacggataaatcttcattaaagggcgttaccaaagcaacacctactccttttaaaatgctcatctgttagaattatttttgccaaatttaatcatttgtaagaagaatttctaataattaataatgttttattatacatataattatatttgcatatactaaaagatataatggagttatcagctaaattgtttatcaatatacaatagaatgataattaccaataccttaataatataattgtcgacgtatgaaaaataaattcttgttattaggaattgctctggctgccctttcggcttgtaagacggcttcatcggcctcttccatgcagattgcagaggtaaagacccagaaaaatatttctattaataatgagctaaaaaatgaggaggaatttgtaaaaattatcgaaccttacaagcaaaaactggataaagagatgaaccaaaagatctctcacaccaatgtagatcttacaaaacaaggcgataacagtaacttaggcaatcttttagcagattatactttcgacggagcagatgtttgggcaaagaaaaatttacagaaaaatgtagacgcagccctcattaacatcggaggaatccgtaccacgatcgggaaaggagatattttactgaaaagtgtatttgaagtaatgccttttgaaaatgaagtgattatcgtaaaaatgaaaggcagcgatcttcagggactttttgattattatgcagaacatcaggtaaacaatcctgtgtctcatttgtatatagaaaccaataacggacagctaaccaaaactttaatcaacggaaagacagtaaatccggaacaggattattatattgccacttcagattatctggctttgggaggcgacaatatgaaatttttctcgaaaggagaaatgattcctacaggaatgaaattaagagatcttttcatcgattattttaagaaaacccctgaagtggttcccaatacagatgttcgtctaaattttatcggtaaaaagtaatggatagaaaaagttttttaaaagcaataggaggcggaactttagcaatggctttagctcccaatatgatgatggcggaagaattaaacattcttgatttaaagtccgcaacgaaacttactattcttcacaccaacgatcagcacagcagaatagagccttttgacgcaagctataccaaaaatcccaatcagggaggttttgcaagaagggcaagtttaatacaacagatcagaaatcaggaaagcaatgttttgcttctggattccggagatatttttcagggaactccctatttcaactttttcggcggtgaattggagtttaaattaatgtccatgatgaaatatgatgcttccaccatgggaaatcatgattttgataatggtctgaacggatttttgaaagttttgcccaatgcaaaattccctttcatctgttcaaattacgattttaaaaataccgttctggacggaaaaacgtctccatacaaaatattcaataaaaacggtatcaaggtgggaattttcggagtgggaattcaactcgacgggctcgttggcaaaaaacaatatggagaaacagtttactccgatcctgtagacgttgcccaacattattccaacttcctgaaaaacgaacaaaaatgtgatcttgtgatctgcctttcacatatcggctacgattataaagacgaatctaataaaataagtgataaaatcttagcttccaaaacagaaaatattgatattattctgggcggtcatacccacactttcttaccggaaccacagacttttaccaacagagcaggcaaaagtgttctggtaaatcaggtaggatgggcaggtcttctgttgggcagaatagatttcttctttgacactaataaaaatgtaaaacatatttcctggaacaatcaggtaatagacagcagcataatagcataagcatgaaaaaactctctttaatctctcttggtattttagcatccctgcaagttgcacatgcacagactatttcttcaaaaaaatgggcagacttattctcctacaataatgttcttgccatgaaagaagataacggaaaaatagttgcagcagcagaaagcggggttttctactataccatttctactggtgaaattaccaaactgtctaaagcaaacggtttgcatgaggttaaagtttcagcttttgattacaatccgcagaacaaaatcggtttggtaggttatcaaaacggctcgctggacgtcattactccggatggaattacttatgttgttgatattcctattgcgaccggatataacggaagcaaaaaaatcaaccatatctcaattacaggagatcttgctgttatttctgtaggttacggtgtttcaatattcgatctgaagaagaaagaatttaaagattctgcattctttttatcaggaggagtttatcaggcaagtaatgaagccacgatcttcggaaataaagtgttttctgtaaccaataccggtcttagaagccatgaaatgaatactactttccctgttttttcgacctggactacagaattggcaggtacattcaagcatatcgattccgaaggggttctgagcttttcttcagccaatacagcctatgtatataatggaggagctttcactccgctttcacagtcatttaccaatgttcatgatgtcgtagtaactaataacagtattgtagttacggatctcagcagagtgtatacattcggaaccaacggaaactttaacgcaaacgtaacttttggtgaggaatgtaacactgcaaccactgtaggaagcagtgtttatggcggaacaattttttcaggaattaaaaacgaggggggaaataccttcaaaccggacggtccttatcagaattatgcttataaaatcagtctttacggagaaaatcagattttggtatctacaggaggaagagaaagcagattcaacactcctattttcaatgtaaaaaatcccggattttattattttgacgggatgagctggatctatccttcctattttaaaggaaattcaaccgtattcaatgttttggatgttgttgcagatccggtaaatccaactgatgtattttttgcgaactacatgacggatggatcacgcggaatttataaaatgaaatacaatgcaggaaacaaggattttactttcgtcaaaaaatatgatttaggaactactaatatcttcacaaggcgtcctgtaggtttgacttttgatgattcgaacaatctttttgcttctatagctttctccggtgacggtgctgcacttggtccttatacagcaatcggtgcatacgacagaacaggagatgactttgttataaaaaacaccacttctcaatttggagcttcccagaaagctctttacaatgaaggacttctttttattcctacgccgagaactaataattttatagcttacgatacaaagaaaacacaaagcacttcagacgataccgcctatattttaacacaacctaacggttttgcaacaacttccggaggaacgctttctgtagcggtcgataaatccggagatgcatggatcggtacggatgccggactaagaattttaccaaacgctgtttcagctataaaaacaccgtcttccgcaaccgttgagccaattattatagaacagaacggattgggtgaagaacttttcagagacgggcagattttacagattgaggtggatgcaggagaccacaagtgggtttctgttgatggtggtggagtttattatctttctgcagacggacaacagaccattaaacattttaccaaagaaaattctccgcttccgacgaataccattaccgatataaaggttgataaaaaaacaggaaaagtatattttgtttcttatgacggaattgtgacgtatcagggagatgttgccgatgtaacatcaaatttcggaaacgttctggtatatccaaaccctgtagtttattctaattttaaaggaaaggttacgattaaaggattggcagaagtcaccaacatccgaattgcggatgctgcaggaaacgttgtgcattcagcggtggcaagaggaggatactacgagtgggatctcaataaccagagaggaacaagagttgcttcgggagtatatttcgtattaatgaccaatgaagacggctccgataaagctacagcgaagattgctgtcgtaaattaatgaattcacaaagcggatttttattatcttatataaaatatggtgaaaatgatgcggttttgcattgtttcactgaagaagacgggtttcagtcttattttttgaaaggaatatatgctaagaaaaataagaaaaaagcccttcttctgccattaagcaagcttaatttctctgtaaatcctgtaaaaggaaacggaatccagacgatttcaaaatttgaaatgattaaaagcaacgatatttatacggatattcgctgtaatacggttgtgttttttatttcagattttttaaatcagaatttaagacatgaaaacaaaaatcatcatatttttttctgtcttgaagaatttacggatgagctggaaagccgcaactatcagtcgcatcttatttttttaattaaaattctaaaaattcagggcgttgcaccattattgaacgaaggaaaattccttgatcctgaaacaggaacttttacccatgaaataatgcaccaactgtttacagaagaagtttcagccatctggaaaagaattctttctgctgaaaatccttacggcattaaaatacattccaatttcaggaaagactttttagacagcatacttgtgtattatcattaccatatcaccgattttaaaattccggcttctctggaagtcattcagcagatatttgaatgattaatacaggagaattagcgttaagtaagatattattgatttaaaattccacatttttcggtgtttcagtctcagattctgcgatattctttctggaaaatcttggcattaaaattttggcaataagacctgtccagccagtctgatgtgatgctcccactccacgaccggtatcgccatgaaaatattcgtagaataaaatatagtctttaaaatccggatcggtctgaaatctggggtattgggaattaaacgggcggtttcctttttcatcttctaaaaataattgagacagtcttttgcttaaagcctctgcaatttcgtcaaggttggaatagtttccgcttcctgtaggatattccaccaaaaaatcgggactgtaatagaaaaagaaccgttgcagactttcaataattaaaaaattaatcggaaaccagatcggaccgcgccagttgctatttccgccgaaaagtccgctgtcactttctgcgggagtatattttaccttataatctgttccgttgagatttagggtaaacggattttcctcatattcttttgaaagcgcgcgaacaccaaagtcacttaaaaactgcttcggatcgagcattctgcttaataatctcttcaaacgatgtcctcttaaaagagaaagtaagtgtttggactcatcaccttttacttcccaatgagaaactaaagcagccagttcaggtttattttccaaaacccaggtcattcttttcttaaaattcggaagtttttcaatcatttcgtcatcaataacctcaaccgcaaacatgggaataagtcccacaattgttcttaatttcagatacatatgatctccgtcacttgaagcgatggcatcataaaagaattcgtcttcttcatcccaaaggctgaaacattcttcacccatattatccagagaattggcaattgccagaaaatgctcaaaaaacttcatcgccatttcttcgtacacattgttgtataatgcgagttccatggcaattctcatcatatttaaagcaaacattgccatccagctcgttccgtcggactgttccagatgttctccgttcggaagcggcatattccggtcgaaaacaccgatattgtcgagtcctaaaaatccgccttcgaaaatattatttccgttgttgtcttttttattcacccaccatgtaaaattcatcaaaagtttctgaaaagcactttccagaaattgcagatcaggatttcctttcaagtattcatcaattttaaaaaccctgaaaactgcccacgcatgaacgggaggatttacatcactaaaatcccattcataagccggaagctgtccgtttggatgcatataccattcaaaaagaaacaatttgagctgatgttttgcaaaatcgggatcaattaatgaaaaactgatggtatgaaaagccagatcccacgttgcgtaccacggatattcccatttgtcgggcatggaaataatatgctcgttgttgaggtgcttccattcagaatttcttatgtgttcacgggattttggaggaggagtttgtgacggatctcctttcagccaacgttccacattgtaatgatagaacattttgttccagagcattcctgcaaaagcctgtcgctgaaccagtttttcgtcttctatttttattccgcactgaatgtctgcataaaattcgtctgcttctttttgtcttgaaacgaaaatttcctcaaaatcctgaaatggatgtttcagatcctgatctgaaagtctgaattcaaaagtctttgtttcttttggtttaaaattttcgtcgatgaaaaaggaagcctttgttccgaaatcttttggatttacagactgggaatttccgttgatgacaaaatcgttgattccgtcttttgtatattttgactggttttgagaatgataaagtctttcattattcgtttcgttatcgcagaataatactttctgagcattttttgcgtatacatttttgatttctaaatcctgatgattaatcctgatgcaatctaaattttcagaattcatctgaggtttgtaattattatatccccaattccatgtatttctgaaccagattgtaggaagaataattaacgaagcttctttttctgatttattaaccacggttaatttcacaagaatatcattctgactttctttggcatattcaataaaaatatcaaagtactcgttttggtcgaaaattccggtatcgattaattcgtattcgggatcttcttttcctctttctgcgttggtttttatgagatcttcgtagggaaatgcattttgaggatatttgtacagcattttcatgtaagaatgcgtaggcatggaatcgagatagtaaaaatattctttcacatcttcaccatggtttccctgaccgtttgataagccaaagaagcgttctttcaccattttatcttttttgttccagaatccgactgaaaaaacaagtttctgaaggtcatcgcagatgccgcagattccttcttcgccccaacggtaggttttggcttccgcaatgtcgtgattggtgtagttccatgcatcaccatctgcgctgtaatcttcgcgcaccaatccccattcgcggttgctgacgtaaggtccccattttttccatgtaacgtcggacagtctttctttttctttcatgttttttataaatgatgattaactacgaatatttaattttttggtaaacctcataggttttaaaaacctatgaggtttgattaattcaccaattcatttcctttaataacttatattcatgcttcggctaccatgcgctccggattgaacggtctgtctgagctctttttgtaagcattggaaaaagcaaggcacaaaaaagcgagtagtgaaagccggaaatatgcgcccaaagaattatcctcctgttgaaaagctttcgaacgttgtcattccgccatcaacgaaaatacttgctccggtgatgtaatctgcaagatcacttgccagaaacgccgccatatttccgatgtcctgcggctgcccgattctgttgtaaggaatcaaatctaataaagagtttaacgcttcaggagtgctccatgcatctttgttgatgggtgtctgaatcgctccgggacagatggaattgacacggattttgtcggctccgtattcctgcgccaaagtctgcatgagcattctgattgcgcctttgcttgaagcataattggcatgacctgcccaaggaatgacttcgtgaacggaactgatgtgaatgatttttccacaggcaacggaacgcgaaggatcgatgccacggcgaagaaattctttgatggcttctctcgcacataagaattgccctgtaagattgattccgatgacggtattccactgatcgagtgtcatttccgtgaattttgcatctttctgaacacctgcgttgttgatgagaatatcgactgttccgaattgtgaaaccacatcctgaaacattttgatgacctgatcttctttggaaacatcgcactgataggttattccgtttccgcctgcctcggtgatttcttttaaaacggctttggcttcatctgacgaatgctccgaagagtgattgacaataactgttgctccggctgaagcgagtgattttgcaattcctgaaccgattccgctagaagctccggtaacgacagcgacctgattgtgaagagatatttccatgttttattatttgatgttactcaaatttaggtgaaagtttcacgccaaacatgaaaattctgaattaaaaatttcttaaagtttgatttttaaggattatgcaaaaactcttttctattgaaccgataattttttcaaaaattctgttttacaattttttgtacatcaaatattgtattccgcttctgcccattcttgtttttccgtcgaatttatagccaactttgaggtataattcgtaagcggaactattgttttggttgactgcaagaacgatttcgctgcaatctttgaagtgttccagaacaaattcgtcaagaaggatcattgctgcttttccgatccctcttccctgcaattcaggatttatggaaagggagcgcaataacgtagaattctgattgtctgtaaggtctaatttatcatttccgaaatccagcacaaaaaaaccggcaggatgatgattttccagaatggtgatgggaaaagcaagggtgtcgctccgctcttcaattttctgtaatgcctgttctgcagttgcggtgtattgtgactgcagttcgtccaaagtatagcttactccggaaaaatctttcggttcgtaaaattttaattttaccataatttaatgatgataaatgtcttcatacattactcctgcccgaatttcaaccagaagcttattttcttcgggaacaacgggacagttgtaatcgtaagcgttgtaggcacagtaaggatgatacgatttattaaaatccagaataatggttttgcctttcggaaccgttaaatcgagatattttccaccgccgtaggtttctttttcattggtggcatcgcggaaaggcagaaataaatggtctttgtattttttctgtttgattaaatccagactttgatacagcgttaatatatatgactttccgtctaactgaaatgttgcttttccaaattctctgtaaggtttcgtttttcctgaagacgtaggaagatcaaagggttctgcgttttccgttttctggaattttgcggtaattctgtattttaaattgatcggaaagaaaggatgctgcttaaaatttttaaagttatctccgcgcaaaggcgtttctttcgggtttaaatattctgcattgagttctttctgaaattttttaatttcagtttcttcttttgaaatcttttgagagaatatcaatagtggaaaaagtaaaaagatgaatatgtattttttcatgaacttttaactatggtttatgacgaatattttatactgaataagctattcagcagatcactctttagtaagattctgaaattttcacacggtagatgtcggatgaatttcgtttaatggattccacaaaaaacccgccttcttccggaataatctcctttaaatcaaaacttttacaatctttcggcaatcctgaaaacacgagagtaaaccagaaatctctcataaacggaaccggagtccagtcgggatagatggtaatattttctgcatgaattagtttgctctgatgttctgactgattatcaaaaagataggtagactgccagattctgatgaagttcccaaagaatggtgaagccggaaaacagcaatgtacaattacctgccgttcctcttccatcttaatctggagggattctaataattctttcacgatcaccggttttacaattgtttctgacataatttctttgtgaagaaaatagtcagttcctctaatttagtattttaatttgaaatctgactattctttaatcactttttttaatatttcagctgcaatttttcttttgaatagtttcttactttttctgtaagttcaggattgtctgccagtttctgtccgtaagaaggcactatttccagcagtttttctttccactcgccatgaagtttttcagggaagcatttttcaagtacgctcagcattgcataaactgctgtagacgctcccggagaagctcccaatagtgaagcaatggttccttttttattcactactacttcagttccgaattccagtttaccgccgtgtttttcatcttttttaatgatctgaactcgttgtccggcaactttcagttcccagtcttcttctttggcatctttaataaattctctcaaatgctgaattctttgggatttcgtcattgccacctgctgaaccagatatttggttaaaggaatgttatgccaccaagctccgaaaagcgatctcaaatttttagtattcacactttcaggtagatccagatagcttccttcttttaaaaacttagttgaaaatcctgcaaaaggtccgaaaagaagggctttctctccgtcaataattcttaaatccaaatgaggaaccgacattggcggagcatccaccgttgcctgtgtatatacttttgcctgatgtttttctaccaattcctgattatgacttaccagccattgtccggaaaccggaaaaccgccgtagccttcgctttctttgatttctgaactgtctaacaacggcaaagcataccctcctgccccaatgaatacaaaatccgcctctacttcctgtttgtgattatgaattctgtctttcactttcatttcccatgttccgtcttctttcggatcaatgttttttacttcgtggtacaggaaaacttcaacattggaatcttccagcaaatgtcttcccatttttctggttaatgttccaaaattaacatctgttcccatattcattttggttgccgccattacttcagactgatttcttttgctcattaccaaaggaatccattctctcaatttatcgtgatcggttgaaaactccattcctttaaacagaacggattctgacattttctcatgacgttttttaagatattctgcatctttttctccaaaaacgagactcatgtgcggacaggaattgatgaaatccttcggttcgctgatgtaacctttggtaattaagtaagaccagaactgttttgaaatttcaaactgttcggcaatgctttctgctttggaaatatcaatggttccgtcgggtttttcgggagtataattaagctcacaaaacgctgaatgacctgttcctgcattattccaggctgctgtactttctttggcaaaccttcccagcctttcaaaaatagctatttcgagctcaggatcaaattcgtgtaataatgtagctaaagtggcactcataattccgccacctattagaacaacgtcgtattttggtttcggcgttctgcttgtaagcgattgtgacataatttaaattttataggtcaaagttcgggaaaagttattgaaaatcggctttgttaaacgattttaacatgagtttttgggaaaaaaccagagtttttattattgtctgtatagtatttttttaaaggcttcggcggcttcgccgccgaaacctttaaaaaaaaagcatccgcaaagtttgcggatgccctgtatgatttaaaattcagattaattcagctttgcagttagctttttaaactgtttttctgcatttttcccttcgtataaaattccgtagatggtatctacaatcggaagtttcaatcctttttcctttgaggttttgtaaatagaattggctgcataataaccttctgcaatcatgttcatcgactggattgccgattttacggtatatcctttcccaataagatttcctaagtttctgtttctggaaaataatgaatatgccgtaaccagtaaatctccgagataagcactttcgttcacgtctctcggcgcttcgtagatggcttcaagaaaagtttccatttcacggattgcattggaaacaaaaacagcggtaaagttgtctccatatcctaaaccgctcgcaattccggctccgatagcgaaaatatttttaagaatcgcactgtattcgttgcctaagatatctttgctggaatgcattttaataaaatctgaattgaaaatatccaccagtttctgtgaaacctcatcttctaccgttgcaacagtaagataggaaagtctttccattgctacttcttctgcgtgacaaggtcctgcaatcaccgcctgatttctgaagcctattttaaattcatctcttaaataatgtgctacgacatcatttaccttcggaataattccttttatggcagaaacaaaaattttattctgataatcacaggtcattttctccagcgtatcggaaagatagatcgacggtgttgccaaaacgataatttcacaggcagaaaccagctcgttgacatcggttgtaagcttaagatttttaagattaaaattgactgccgtaagataagtggggttatgacctctctgctctatagctccttttacgtactcatttcttacgcaccaatgcacgattttgcagttttccacaagcattttcacaatagcagtcgcaaaacttccacttccgactactcctaccgcaacgtcatttttgcttttcttcgggttcgattctatatttgttttctttttagccataatagaaatgtgaactgcaaatatattaaaacaaagacggaaagaaggattttcggagcatgataaaacccaaatttagacaaaattaacacttcaacacaattaaatatctaatcgaccgttaattacagaaaaaactaaagttttgttaaaaataagcctgaaagtttatttttaattaaatttgcaggcttaaaaccgttttgtaattatactaagagaagaaaaatgaagaaatttctaagcagtaaaaagaacataaatgtgcttttaggaggacttttattagtagtttttgcgcaaggtattttcattgcaaagttgtattcggaaaaggacaacaaaaattatgaagtaaaccttgtaaaaataaacactgaaaaagacagtgtagattacctgaaaatgaaaactgatcttacactggtagatcaaaccgtagcggagctgaattctttccttaaatctaaggatgttcccaacgaaaaagttactattctgagcaaagacagtatctccaactctatctatctggcaaaacaggcaaaccgatacagccagtatctgatgaatcttcagaaaaagttactggaagttcctttgggaatgccgactgaaggttatatttcgtctaatttcggagtgagaaagaaccctataccttttaaaaccattttagcttcggtaaaaagcagtgctgccaaacctgctgctgttgcagccgcagctccggaagtaaaagctgaacctgtagaaaaaattatagaagtaacagacagctatggaaataaaagagaggtaaaagtaatggtaactccaaaagctccttctgtagctcccgctcctgcttcgtcagcaaaatctgttgcagccggatctgaaaaaccagcagaaaagaacaatgcgcctgcagaagcagaccagatgcagtttcataaaggactggatatcgctgttgcttatggatcggatgtcgtggcaactgcagccggaactgttattttttccggacagaaaggaggatacggaaattgtgtgatcgtttctcacggcaacggactggcaactctttacggacatttgtcgcagttggtcgctaaagtgaatgataaagtaaaagtgggacaggttatcgccaaatccggaaattcgggtcgttctaccggacctcatcttcattatgaggtacataagaacaatactccggtaaatccaaagttgtttatgaatctttaaattaagatctaaaatatagagtttcggcggcacctttggtgccgccgaaacttttaaaacatatcttaaaaaaattagtaggctgctgtaaaacgctctctgatgtggttattctgttccagttcatccactaaaaccaccgccacatcttctacggaaagaacacttcttccgttttcatcaaaaacaggactctccagaccggttctgtattttccggttcttacgcctgccgttccctgatgcatttcaattgccggactgaaaaatgtccagtctaaggtttcattttctttaattttatttaaataatctcttgctgcagttgctcccggttttatctcagcaggaaaatctggtccgtctaccagttgttttccatcaatataaagacttcctgccccgcccacagtaataaatctttttacaccggattgttcaactgctttttcgatatttacagatccattcagaaagtcatcatacaaattaggattggtccatcccgcgttaaaagcactgattacggcatcatttccttttaaagcttctgataattcgtctgttttgtttacatcaacgcttttagctgttattttttcgttttgctccacttttgaagcatctcttacaatggcttctacatgatatcctctgttggataattcttttacaacctgagttcctacaaaacctgtcgctcctattactgctacttttttcatatttttttatttttaatatttaattgtaataatttttgttacatttttcgttaaaaaattttatttgaattggtcgctgaattctttcaaagatttatttcctaaaaaattgagaaccaactgatctgtttctgaaaacaatatcctaagatgattattaatgtctttccctacaggacaaaccggattcggattattatttttctttcctaaaacttccgtgttcttcacagccagatagatttcagaaattcgtatagaatctgcactctttgccagctgactccctccttcttttccctgtcggcttataattaaacccgcttctcttaacacaccaagctctttacgaacaaccacaggattgatattgatacttcctgctatccattctgaagtaagccaatcctgcggactttccgccaataaggtcataatatgtattgccgtagcaaatcttgtattgttcattgtaattactcagcaaagatagataattttttaatgtaacaaaatttattacaattaaattttgttaaagtatcagacgatcaagatccagaagaagataattgatgttctgattgatggttctggttgccgactgcatctggttgagcattgcggcacggttatgaagatcatctgaacggtaaaatcctccgtcactgaaaataacagattcgtctgccttttttctgtcatcatcaaactgataatgaagccagcgctctttcatgctcgaaataatggaatgctgttccctgttggaaaactttttttctgtatacatataccagataaacggcggaaagttaggtgactgtaatttgccattccatacatctcttagcagatttctctgatgaataaattctacttttttacctttcggatttaaagttgccaaaccgaatcctgctcctaaaactcctcctccgatatcaatggcattactccatgaattatcttttacaatccctcccgctaccgaagctgcagctcctgttacaattgacagcagaataagcttattgtttctggaatcgtttaagttatccacataatttccgatctgtgctactctttcgccttcacagtcgaattctgcagcaaccgcatccagctcggttaaagcaatggttattttgctgttgattttagatttaagctgtaaaacttttacctgagactccagagaagtatcttttttaagctccatgatctcatgaacttcgtccagattatccaaagcattaagaataagaatactctggtcagaaaatttatctcttaactctttattggcctgaataatggaatctgaattgtacgaaggaagtttattaccgtaattatacttgaaaggcgccttacagtagctgtctttgagtgtaagaatattttgcttaattgcctgattttttctggatacgcaggaagtaagcaacatacagaatgctgcgaagtaaattatcttcttcattgattgatgtttttgcgattcgggattcttatttttttatctgtaagatgtaaactttcagaaaactaataagacttgctttatttaaatttcaaaccaaatataaaattacacaaataaaaaaatttacccgaataacaggtaaatttttaagctatttttaataaaattatttcttgatatccagcaattccacttcaaaaataagcgtggaattcggaccaatctctttgctgatctgctgatctccgtaagcaagatgcggaggaataatcagtctccacttgcttcctacaggcataagctgaagcgcttctgtccatcctgcaatcactctgtttaaaggaaatgaagccggagttcctctttttacagaactgtcgaaaacttttccggtaatggttgttccgtgataatggcattttaccgtagatctaggacccggcttttcgccttcaccttccgtaatgatttcatactgtaatccgctaggcaattctacgacgctttctctcttgccatattctgccatatattcctgaccgtctttcaggtttttttctgccaattcttttttacgtttaaataacatatctgctactcccataattgataatttttgcaaagataattctttgtgctggaagatgacagccggaagatggaagttttttaatcatagaaaattttcaaaatatataaatcattagttttcaatttattaaattttatttttttttgcatctttaactcagcttaaaaaattcaagtatcattaatattctgttaataggatttcggaaacttggcgttataattggacttaaaaactaaatgcccaatccattaccatataaaaaggaatatgacagactgactgatgaagagcaagagcttctggaaatcaataaaaaaagtattaccgattttgttgaacagtccccttctgtaagtaatgttcactatgcaacaagaaacgcccatgccaaaacgtatgctgttaccaaaggaacttttctgatcgataaaaacattcctgaagaacttaaaccgtattttgataaggaaaaatacgacctcgttatccggttttccaatgcgcacttaaaggtggtaaaaggaaaaaaagatcttcctgcttatggttttgcagtaaaaataaatgatgaaaaaggaaacgtcattgccaattttcctttggtgaattttccgttgtttccgattaattccgtgagtacatttctaaaattatttacatccgttaatcgcttttttgttaaaaaatggagttccttttccttactaatgcagatattgaaagtaattccctctacatttaccttatcatttgtaaaaaatatatttaagctctggagcaaaagaaatgatttttttctttcgtttgattttcattctgtcggtgtgtacagactgggagattatatgatgaaaattaaaatcaacccacaatctgtcaacaaatatttcgggaagaaattaaaggtaaaaaatgctgtggaacgttatcttagagaagaaaatttcacggcagatgttcttattcagctttgctatgacctgaaagatcagcctgtgaataaacttaatgtcgaatggaaaaattcgccctatattaaaatcggggaagtgaaaattgaaaaaaacaatcttctgaatgcaaattcctgcgacagtgagctgctttcttttaatccttttgaaagtaagattttctttcagcccgtcggaaaaattcaaaagctccgcgatgaagcgtataaggtttctgtacaaacgaggcggaaaatcaataagctattgaaatataacaaataatgaaaaaagaatggtgaatttttgactttcctgtcatttcgacgaaggagaaatctattttgattgatcttaacgcaaggttcgctgggttttgttttacattatagtgggtattttttgttcgcaagggcgtttcactcagcaaatgatagcaactttgattattcggctcttcgattttaggagaaatttatttttattgttttcaacgcaaggttcgctgggttttgttttacattgtaacgggtattttttgttcgcaagggcgcttcactcagcaaatgatagcaactttgattattcggctcttgattttaggagaaatttatttttattgattctaacgcaaggttcgccagattttgttttacattctggtgatattttttgttcgcaagggcgtttcactcagcaaatgataaaaactttgattattcggctcttgattttaggagaaatttatttttattgattctaacgcaaggttcgccaggttttgttttacattctggtgatattttttgttcgcaagggcgtttcactcagcaaatgataaaaactttgattattcggctcttgattttaggagaaatttatttttattgattttaacgcaaggttcactaaattttgttttacattgtagtgggtatttttgttcgcgaaggtatttgacttcgtcgaatcttcgatttcactcagcgaatgataattatgaagactaaaatcgtttttgccacgcaattttttttaattctgttgagatttctaaaggatgagaaactttattggctaattcaaatattgaaaaacagactaattccatagccgcgattgaagcaattgtttgagctcatttttaagctttttggcggcgcggcaaagccgcgccgccaaaaagcttaaaaatagcgagtgcggaaagcgcgaaacagctcccaaaaataaaataataaaaaaggctctacaaattgtgtaaagcctttctatttttaataagaactgatcttattcttcaattttctcttggtcttcgtcatcctttttatcggggaaaatcagggataaaatcactgaaattaccaaaactcctccaacgattcccaaagaaaccggagacggaatatgaatccacggtgcaatcagcattttcactccgatgaacgataaaataacagccaaaccgtaaggcaatttgctgaacatatgaatgaaattcgccaacaggaaatacaacgatcttaatcctaaaattgcgaaaatattcgatgtgtaaaggataaacggatcattggaaatcgcgaagattgccggaatggaatctactgcaaaaagtacatccgtaaactcaattacggctacaacaaccaaaagcggggttgccatttttattccgttctgtaccgtgaaaaatttgtcgcccacgtaattgtctgaaactttccagaatctcttaatcagtcgtgctcctgctgtattgctgtaatcttcttcgtcatcatcatctccgtcgccccacgattttattcctgcatacacaaggaacaacccgaataaagtcattacaatattgatttttaccggatgtccgaaaatattcatttcaggaaggtaagtaaggttgattaatcctacacccgcaaaaataaagatcgccctgaaaatcaatgctccgataattccccagaaaagaactttgtggtggaggtatttcggaactttaaaaaatccgaaaaccagaatgaatacaaataagttatccaccgaaagtgccttctcaatccagtaagccgcctgatactgcgtgaatttctctactgccaaagcatgactttcgggacttccgtctgtattgaaaacccaataaaccacacctgagaataccatagacagtgagatccatacgattgaccagattgtagcttctttggaagaaacttcatgactttttttgttgaaaactcctaaatccagaagcaacatgataactactgttatcgcaaatccccaaaccagaccgggatgaagatctaaaataccttgatgtttgtccacttttaaatgtgcttattatacgataaaagcaatatttgtacgggtacaagtattgctaaattttatttttattttaaaatttcattcaacagttaataagttttggctaaagccggattggaaacctatttttaacgcaaacgggctaaagcccgtttctattgaatatgaatattttacaaatatttctgctttacagtttctattgtttcctgtaattttctgtctgctgtaggatctccgatcgcgttgaacttccattctccgtttcttttgtagaaaacgcccattaccatggcaacgtgacctttgaaagaagcatcattcgcaatatcatattttgcaaaaacttctcttacgctggtcggcgtcccttcataaattctgatggatgcgaaaggaatagtaccgaaatcctgacctttataactgttcagaaccaaagcaacgtgttctacattggaatccagattgctgaaatccacagtaatcacctcattgtcaagaccgtcatctccatttacgtctcccgttaaatcgtctccgctgtgtcttactgaaccgtttttagattttaagttcccgaaatagattacttctgtcgcgtttttattggaatcgtataaaatacagcttccgtctaaatctacagcttcttttgtaactcctccgaagaatcctttcttctcgattgctccccagttgattcccacacaagcctgtgtaagcgtggttccgttttccttcgttaggtttattctctgacctttttgtaagttaatagccattgttatattttgttttagttctaattttaattttttttactttgcttagtttaaacgcaaagactcgcaaagatttttttaaatttattctgcatattttgttcgcaaagggcgtttcactcagcaaatgatagcagtacagtgaaaaagtttgtaaagaattgattttattaaattactttttactaattatttaaatttaaattcagcattgcacgaagaatattggtttcttcattgatgtcgaacattttactcataacgtcggtattttcaagatttttaagataatctttcaatactgaaatcacctgctccggcaacgttttttttctttcgttcattgtctcttccaattgttcgttttttctttttagctgataaacaattgttccctgattcgattcattgggcattgtatctagtttttccagttttttaggatcaattaaatacatttttctgccttcgatatcaaaaatgaagtgatcgtcggactggaagattttaaataattcatattcgtttcccgtgatgacatatccgcatacaaaacgaaccttaaagttctgaatattaagccttcccagtaatttcctttcaatctgataatcctgatactgataggcaggaaaagaaccggatttcagcaattcttcttcaacgttcgaacggtagaattctgccgcatattttttgtagaaatacagaacattgtcccagtttgcccgaaatttgtcttccgtaagatcattgtacaggcttttaagctgattggaaaagattccgctgtacattttccggtctgtttcaaagccatctacacgcttttcctcaaaacctgaaatatatttgctgttaacatcaatttcattaagcaccgccaacatctcattttccttctgccttttaattttggttaaaagctcaataagactgtcggtatactgaagatgaaaaagttccagtttgctgtaatcgagtcccttattttcctgaaaaagattatggataatatcggtcttaatgtagatcgaaattatatcaacattttcaaaaaaatttgcaagaagtttaagtttggttaatcttcttttgctttgcgacaatatgtttacagcatcatcattcacttttcatctcccgttattatcctcttacgtttgcttttaattcgtgttccagagtcatcagatcctgatccagctttcttcttccttctgctccctgtttttggatctgctttacttcgtttaatgtattgattaattttgaagttgtttctctcagtgtttccacagaaacgatcgtctgttcattcgctctggccacattaatagagttttgcccaagacgttctgcattctttcttaaaatttcttctgttgtagccgaaactttctgctgaatttcaatgctttgctgctgtctgtacatcgctactgccagtgaaagctgatttttccagagcggtaaagtcgtcgttaaaatcgtctgtgctttttctgcaatcgaaacgttgttgttctgaacgagtctgatctgcggaagtgactgcatcatgattaaacgaactactttcagatcagctaatctcctgtctaatcttgcaataaaatctctcttatcggcaatctgataatcctgaaattcctgcgtattggcttccatgtgtgctaattccgctccggctttttccattctcaggtttccgataatcaccagctcttcgatttgtttgatcgcgttgacattactttcgaaaatcgtctgtaaaaccgcattatctttcgttgaagtaatgattcctgcgtttactttataagcaatctgatcgatattgttgatgattttatcatatttggcaaataaattctcaatctgcgtcatgacacttttcatgaaaggcaatttgcttaaaaaacttttgaatttattctgatttaattcttcaacatctacataattcagctcgactaataaattattaatcaattcacctacttcaccggaatttgatctccttacatttccaaggaaactgtcactctggttggataatgttctctgaaggtctgccccgaaattaacgatggatccaggattcgtttcgtcaatagaatctgcaagggcttcatatttctggcgttcttctgcctgtaactgcgtaagatttacatttccgtctctgtccactaaaggtgcaggaggcgtacttggcgttgccatactcggcggcggcgccatcggagtaggttcgaatgtctttaaaggttcgatggatccaagcggatctataggttggttttcctgattgtccataatagattattgatagattgatacaaatttttcaagaccttctctctgtccgcttcctaccgcttcaaatttccattcgccgtttctgttgtagattcttccaaattctactgcggtttcgatagagaaatcttcgtccaattcatattttaaaatttcttcgttggtatctgtattgaaaattctgatgaaagaatttcttacctgtccgaagttctgtcttcttgaatccgcatcgtgaatggttaccacaacagtaatttctttcacggcaggatcgattttagtaagatcgattttaatctgctcatcatctcctgctccgtctcccgttaaattgtcacctgagtgaattaccgctttgtccggagactccagattgttgtaaaagatgaagtgattatctgaaattaactttttattttcacctaataaaaataaagaagcatccaaatcgaaagcggttccggtagatgtattgttaatatcccatccaagaccaaccgtaaatttcggtgcgtttatattttctctctgtcctttctgtaagttaatagccataatataattcggtttgtgttaaagtgtttatattgttttcgtattcttttattaaatgataattattgctgattgccagttccagcagattatccattagttccttttttactttagacgaaagatactcaaaattacctgaatctaagcctaaaatatattttacaattcgtgtattaaactgaaaactaggcttccccattacttccgctatatcttctacatttttcactgcgtaatagttaaagtaattttcaattttaggatcaagatcaaaattcatcagctcagcataatacatgaataaaaaatctgcctctacattatattcatcaagaattttattcactgtaaactcatggcttcctgttattttaatatcatctataaaaatacaaagttttcctctaagaaaatctttatccagataataagtgtcgttcgcgatgagatttttacggtcttcaaaacttaaatttccataatctgtcgtataggtatgatttctgttaattttcgataaaatgcttgatttttttcctttctgaaacaaataaaaatccagatgctttttaaagtaaaaacataaaaaattagacgctgtaggaattgccatgtaaggacttggcaataccacaatttctttatctgtgtttaaaatatcttcatgtccggaaataaatccttcgaacagttcttttgcaaatttttcagcatacgacttatcgccatatttgaaatagctgtattcctcgggtgaaaatgtaaattcatccgccgaatgaatgtggtgtaagctgtacctcttgttcatagttatattttgggtgtaagtaagtgtgcattgaaaccaaaatcctttgcgcctttataatccgcgacaggattatccccgatatgtaaaacctgttttacatctaaatcctgattgggcagtaaatttttcacttcctgaaatattttcggatcgggttttgagcagttcatttcatcagaataaatgtggaaatcaatatactgatcgaggttttcactgatcaggaattttctcatggtttttcctttaataaaacctgtattgcttagaatattgattgtttttccctgatttttaatttcatcaaaaaactgatgtaaattttcaaaaatcacaataggtttatattccagaaacaaatcttcgcttttctgatagaattgatttaactgatctttattcaattgttttacatctacttccagtgcatttaaaattaataaataaatttcaaaagtgtcaacatttcctccaattacctcattgatagaattgcaaagatcatcataatatcttacgactttcgcaacttcgttaataggtttttttacgttaaaaaatgacgagaacagctcaactctttttgctttaaattcaggatgagattttattaaagtaagccacaaatcaaaggaaaaatgggagtgattgtggatgtctatatctgttttcaaaatggtttagttaaaatttttatttagctttttcctgaaaaagatgttttaaatggttattattttctttcatctgttcgtgttcaaaatacaattcctttcaaagatagaatttttaaattaatgtgtaaatgtagtttgatgttttaagaaatttttatgattttccgtaatatttgttattgaaaaattcttttttttaaacacaaagtcctcaaagatttttttataattattgtgggtatttttcgttcgcaaaggcgtttcactcagccaagacttgatgctatcatttgctgaacgaagtgccttggcgaacgaaaatgtcttcaaaggattgaacaaaacctggcgatcctcgcgttaaaaataatttagcaaataatgtctttaaattttcaatttttcagtcgtttaaaaaaattaaaaaaaaatttttgctgttaaaatattttttctagctttgcaaccgattaacaatcaacaatgtcaacaaaaatgataaatataattactttaagcaatcctatcagagctgtgtactttggtagcactaaatatttatctgaataacgaccgaccttataaaactaaaataaaacgaaggcctgtctgtttcagataggtcttttttgctaccctacttttcagcttttacattcggaaaggttgtctaattttttaacgcaaagaaaaattttcttactgaataagaaagtgagcaaagattttaatcaataaattgattttaagaagctggcttcatcagcgattttgtcgcaactctttgctctcttaaataaaaacagttttcaaagaactttgcgttttaaaacattttacaaccttaaaatcaataatttaaatttaacaaaatgaaatacaacacacgaaatatagggattatagcacacgtcgatgcaggaaaaactacactcacggaaagacttctttattacacgggaatgattcataaaatcggaaatgtggacgagggaaataccacaatggataaagacatccaagagaaaaacaggggaattacgatttcttcggcggcaatttctacccagtggaaaaaagatgacaatgtattcaatatcaacattatcgatactccgggacacattgattttgcggtggaagttgaacgttctttacgagttttggacagcgttgtagcagttttctgtgcttcttcgggagttcagccacaaacggaaaacgtttggtttcaggccgagaaacatggaatttcaaagatttgtttcattaataaaatggacagaatcggggcagatttttttgctgttttaaatgaaattaaaacaaaactgaatgcggttcctttagctttacaaattccgatgggttctgaagaccgtttcgaaggtgttatcgatttaattaagcaaaaagcactgtgctggatggatgaaaacggagaaaccattattgaaaaggaaattccggaactttacaacgctgaagctcatgaatggagaatgaaactaatggaaaccttagcggaatctgacgaacagttttttgaatattttctggattctgaaaccaaaatttctgaggaaatgattactgaagccataaaaagagcttgtcagtcaagaaatttagttcctgttttatgtggttctgcattcaaaaacaagggagtacaacctttgcttgatgcgattgtaagttatcttccttcaccggatcagttgtcttccgtgaaaggaaaagatgccaaaacggaagaaacggttgagctggaaagaaatgaagaggaaactttttcaggactggttttcaaagtggtgattgataagcatatgggtaaactttcgatgttgagaatttattcgggatgcatacaatccggcgatacggttcagaatgtaagaacgggtgaaagtttcagaatttcaaggattttgcaaatgcagtcggacaaaacgataacggttgaagaaggaaaagcaggagatattgtggctttaaccggaataaaagatgcgaaaaccggagattctttatcttctattgaacaggctgttttgcttgaatccattacgattccggctccggtaatcaggatttctattgaaccgaaaacaaatgcggatgaaaagtctttcggactggttttagcaaaaattcaggaagaagacccatcgttggttgttgaaagagaccgacaaacaggagaaactttactgagcggtttgggagaactgcatcttgaagttactttagaaaagatcaggttgaatcacggaattgaaatcaatcagggaaaacctaaagtttcgtataaagaaattttaacggaaaccagaacgcaccgtgaaaaactcgtgaaacagaatggcggaagcggacagtttgcagacatcacgtttgaaatcggaccgagaaatgatgatggaatcggtttggaattcatcaatcagatcaaaggcggagtgattcctaatgaatttgttccgtctgttgaaaaaggtttccgagaggcaatggaaaacggagcattacaaggatatcctctggaaagtatgaaagttacacttctggacggatcgactcacagtaatgattctcatgcacaggattttgaaatggctgcgagagacggtttccgggaaataggaaaatcctgtaagcctaaattaatggaacctatcatgaaagttgagattcagacgattgaggattataccggagcggtgactgcggatatcaacaaacgaagaggaatcatcatctcaattgatgaaaaatcgggaagaaaaattttcacggcagaagttcctttagcttctactttcggatatatttctgatctgagaacgttaacgagcggaagagcttcgatcagcatgaagttgtcgcactatgctttggtgcctgatttcatcgcaaatacattagtaacctaaaagacaagggctgtaaatttatttttgcagtccttgtttgggttattgaggtgaattatcaataatgaattgtttttttttgcggattttgcggattttgcagattttttattttctatagattacacaaatatttgcatgaattttaaacttccatcatcgcacttccagcttattcaaaattttatttcctacaaattacaagatttttcagatgtttccggagtatttctaaacttccatcatcgcacttccatcttccatcttcccgccaaacaatcttctcaaccactcaaactctcccacactccaactcaaaaacactcctacttctccggcatcactttatacgtcggatcatcctgaatattcacttcaatcaccgcttctgcgtttttcagcattttacggcagtcttcgcttaagtgtcttaaatgcagttttttattttgttgtgtgtattttttggagagtttatctaaagcgtcaattgcactcatatctacaatacggctttctttaaaatcgatgactacctgatccggatcgtttacaggatcaaacttatcaataaatgttgtaaccgagccaaagaatagcggtcctgaaatctggtaatatttaaccccattttcatccgtcaattttctggcacggattcttttcgcattgtcccacgcaaaaacaagggcagaaatgattacccctaccaaaaccgccaaagccagattgtgaagaataatggtaattaaggctactgtaattccgacaaaaatatcggatttcggcatcttgttaatgatacttatggaaacccactgaaaagtactgatcgcaaccatcatcatgacaccaaccaaagccgccatcgggattttttcaataaaaggcgctccgactaagataataatcaagattgtaatggaagcaatgattccggaaagtctggatttggaacctgcattaagattcaccaaagtctgcgcaaccattgcacagcctcccattccgccgaaaaaaccgttggtaacgttggctagaccttgtgctaccgcttctttattggtgtttccttttgaattggtaatttcatccaccatagacaaagtaagcaaagattcaattaagccaactcctgccataattaaggcgtaaggaaaaataatctgtaaggtttctaatgaaaaaggtatttccggaatatggaaactgggtaaatttccgctgatgcgggcaatatctgcaacggtttttgtatgaattccgaaaccaacaaccactccgaaaacaattaaaatagcaattaaagaagaaggaactactttggagattttcgggaaaaagtaaacgatggcgatcgttaaagcggttaaacctaacataatatataaggaagaaccctgaagccagcttacaacaccgtttgcatcggtaatcttgaactgttctacctgtgccataaaaataatgactgccaaaccattcaggaaaccgtacattacgggttgcggaatcagtctcacaaattttccgagtctgaaaattccgaccagcatctgaaaaactccggctaaagctacagttgcaaataaatattctactccgtgggtttttatcaatgcaattaaaacaacgatggttgctcctgctccaccggaaaccattccgggacgacctccgaaaatagcagttaccaatcccatcataaaggcggcgtataatcctgttaaaggagaaagcccggcaagaatggcaaaggaaagagattcgggaatcatcgtcattgccactgtaaatccggcaagaagttcgtttttgaaatttattttttgagaaaaatcgaaaagtttaagagaattttccattggaaaagtaatgtttaaggatttaatgatattttaaaaacagaaattgctgttttcttttttagaaaacagttttattaaatttatcaaatccttaaggcggtgtaacttcggatgaagtttttgtttttatttgcatattatctgcaaagatattgactaaaaatttctcagacaatttttaccttatttactttaaatatttcacaatatgtttcctgtaaaattatgttctctacaattatttcagaatgtaatatttcacaacacataccacatatttcattaaactttaactaaaaatagtatttcatgaaattttatccctcattcttttggactgaatccaattttttctatatttgatttcagagaagttagtattttttctaaatatttaattcaattattgatgattaattaattacagaaagaaaattatcttaaattataaaaaaaggcgtttacatgatgataaagtagtgataaagtaatggaaattagtattggtgcttacaaaaagtcgggataattaaagtttactgaacaaagtaatgaggatctgaaatacatgagggtactgcaaaataaagcataagttcttggttttacatttctatatcttctatttacaagtaaattctatccaaatttttgtgtgtaaataagtattgcgccaattattaaacgggcataacgtaataaatcgtgctaaagttttcatattttttctatattttataatttcggactgcaaattgcttattaatcactaaggcttaaaaaaacctatgctatacaaagacatacatataggacaatttattaaagaaagagctaacgaactggaagttagtaaagaaagaatgtgcagttttcttaaaaaagatgaggaagctattgataaaatcttcgaaagtgcatcggtagaaacagatcttttattaagatgctctaaacttctggagtatgatttcttcagaatttacagttcgcaccttattttatatgcgcctccttctgctgttgacaaggtaaaaaatccgaaatcggataaaatcccgtatttcagaaaaaatatttatactcaggagatcaaagaatttataatcggaaagatacaatccggagagatgactcacaatgaaatcatccaggagtattctattcctaaaagtacgcttcacagatggctgcaaaaaatttaaaaaaacatcctatgcgtccaaattacacgaagatctatcaggatatgcttaaagaaaaagatcctgataaactgaacgaccccaaagttcagcgtctgataaaaaatttaaaaaccactgaagatgttttgaattttaacgaattggttttcaagcaatcaaaagaaagtctggagaaaaatcagaaactgaagacttacgataagaaaacgatgctgaagcttttgcaataccagaacaagcataatttttctacaaattatatgtcgaaaaagtataaaatcagcagaacaaccattgcgaaatggaaaaaaacgtttgaagaggagtacgaaaaaattacttcaaaaaactgatttcaaaataaaaaaaatccgaaaagcatactgtttttcggatttttaatataaagattaccaacgggaaaagaaaagcggggcatcgttctgccggagtcgaaccggataatcttgccggaacatccgacttcattattcctccccttcgattggtgacgaagtatcttttctcaacgacactttatattttaaaacaaggcaacaaccagaaagtgcaatgtcgtgctctaaccaactgagctacttttcctattttaattttgtgttttttaaactgtggaaaaggcgggactcgaacccgcgaccccgtcgtaatgagcgaagtaacactattctacggcacttgtatattataaaaacagataaggtaaaagacgaaaaaggtatttttgctcttatgagcgccgctcttacccgatttgggcagggagccggcaattctacatctgcgagagacttgcgctttctttcgaaaacttttgcccagttggttttcaacccaacctcaccagttcggtcgcccgaattacgctaccttaggaccgttatatttacgaagtaacccttctctacgacacttatctgtaagtttttaaaattaaaaaagaggcaaaagacgagaaaactctttattataaatcattttcagatttattctggagtcgaaccaacatcattaagattaaccgaagtaagttttctctaacggcactctttattttatcaaggtaaatttcgtacagatatttctccggcgtccttactcaaattagacgacagttttttagttaccgacaggcatcgaacctgtatttccggtttggaacgaaatatttctgtactacgacacccgatatttttaaattttcaataaaaagaggcaaaaggcgaaaagacagacatgcacctgatccctactgttattcaggaaattgcacttgatatttagattttttgatctaaataattgctgttcgaagtaagccttttctacggcactcttttgttttttaaatcaaggtaataatgtgagaatctttcagtgcttttgctctaccgtctgagctacatctcgtttacaacagagaaggcaggaatcgaacctgcgacccaaagattaaatatcgaagtatgattctgaaacgacacttgattttttatgttttttaaatagttttcttaaaaattacaaggcaaacagtgataaaagctgtcttaaaaaccgtctaaccactcgaccacacctttcggcgaaaggattcgaacctctgtacaaatcgaagtaacttttatctacggcacttgtaagtaattttaaaatcgagcaaaattttgaaagagactttttcattttggattcgaaggaactctttcttacggcatcgattatttttaagttttatggttattgttttttgttactgcaaaattattgcattggtacgcaatctttttacgcagttaaaattatttttaaaaaaaaccaagtaacatggtataagagtttttgatatcaattcaaattttaagtaagacgatgtatctcttatgatgacgacattggttgtttaaaaccgggcaatgtaacgaaaagactcttgttcaagtggaaatcgaaggatttcttttcttacggcaccggtaattttttttaagtaaggtgaaaaatcaaacagaattttttattgttgtgtgtttctttttacaccattccgaattccggaaacaggatttttacctgcaatacaactctgctcagtacgaagtaattctgttttacgacacttactttttggttttccattgggtttttctgtattttttccaatttctctgaaacttaatttcttttgaattaatggtttcataaccatgtggaaaacaataagaacaccccatttcatttccatataaaattctggaaatctgcacattcgaaattttcttcggaaagtcaattaatccatattcactgattccgaaagacttctttaatgttttaaattttttcataagtattgagtatttaacctcaatacagtgttcctttaagccattttttataataattcatggttatctgtttttgttgacgcaaagttattatcttagtgcgcattctttttacgcagttgaaatttattttgaaaatattgaaccgataatctctcccagcttaacaagtcctaaaaatggaagtaaaaaaattcctccaatgagcaaataaagccctacattactaaaaaagctatctttagattccgtataatttcctttttctctttgctttcttttaaaatcagggatatgttttgttttcttaaagctatcggtttccagttccttcagaatattttttgcatattccgaaagctgagttttatctccccgaaaaacgatatcttttaaaatagcatttccggaattgcttaatgaatttctatacatttcaaccgcttctttcatttcgaaattctgaggttcagataagatccaaaactttccggcttcatctttaaaccctgaatcataataaatctgagccagtttctctctcaaagaaagatcgtcgggaaactcattgatcagatttcgaaatctgtcgcaggcttttttctttcttcccgccttaagatcctgttcaattctgtaaaaaatagttcccattatttataattattcgtttgttcgttttgaatttgttcctatttcaaacagtagaattttcttaatgttcgtacagtttattttcttaacgcctacatttcccaggtcgtttttttactattaatctttttttgtcattgcgaggagcgtagcgacgaagcaatctttagctatttgaataacatttcattaaagtttggaattacttttttagctaaatttaatacttcttgattttgttctctaatataagtttgctttaatatgtctgttaaaaagttattcaaatcatctgttattttaaagaattcaataatcatttcccctgttttatctccatcaaatttaattattgtattatagtataaatctacattatcactaatatggccactaatattgtttctaattgttttcatatccgtttcatatctatactctttcttaaaaatcttaattgaattattaatatttacaaaactttctttaagatgaataagagctttctcggaaagtatattcaagaattctctatatttattaaatgttttaaaactttcaaaaatagttaagtaaacatttttaattacataaatcttctcccaattatttgaagcattataaagcattttgctagatacagccaaatcgagagtagcaatagcgaacaatgaaactacatcatttattttctttactaagtcaaaaccatctaaacacatctcaatattattcgtatcaaaatgtttttttacacaatcaattattttgtttacttttcttgctgtatctaacacacctgtgaaaacagtaacagtagaatctgcagaatcattaaagtttttacctatgattttcatactaattatttttgtttcgttttctttcctagccccgattgcaacgacatccttttgtgtagcaaagcggaacaaaagatatagtggaaagcgggattaagctcctgaaaaaattggttattagttttttattttaaaagcagtgccttttacaacactacttttttaatcatttctacggcagattttttgtcttccaaagcgttcagtacatcgaaaattttgtcggaccaacctgcgataaggtatagatcgttttgtctgatatccaaaggctgtcttccgtaacccgccaagtcaaaaatatacaattttgcatttgggtgaaaacttttgtattgattccaagaatcttcgaaagaatttcgggttccgttgctgttccaaagctgggtatcggtgaaaatcattactttatctactttttcgcgtctgttcagcaaatcttcgataaccaaataaccgttggtggaataccccacttcgccttctcttttatagaatgcatccacgtttctcagaataccgtttttaggcatcggaactcttttccaggtgtcaccgaatattcctgaaattacatttttgcactgcgactgcaacatcatcgacatcaaaagaccaatatcgtacagcaaaactttagatttcagagaaaccgacttttgcattgagctggaaacgtctgccgcgatcaccaccgaagtatcaaaaccaaaacctttgatatttttggcactcaccaaaaccgcatcttccaatgcttcgagaatggatgacagataaggtgatttcatacttttcagttctctgtacgccgacaagaatctgaaaggcaactgttttgaatttctcacggctttttcatccgaaagatagctgcaaactttctgcatcgcatccggagaaacgttggcttccagaatatttctgaggtttcgcaaagttgccatataacccagtttgttactgaaaatcagttcttcccatttgtttttgaaggctgcttttctttctgcatcatcggcaaattttgtctgtcccaaaacggaaagttctacttcccaagtataaggtgtttccaacgaatcgttgacgattttgttgaaaattgcctgttggttttcatcttttgctttcgggtgaaccaggaacaaggcatctttcagggtaacttccgcttttctgttgtatttcgcgaactggtattcatcaaatttattgaatgattttaccagacctttctgaatttgctttgacagtttgttgagttttttaagatctgttctttcgtttgccaattggtaatatgccaaaagttcagtaatttcatccgctctctggatcacgccgtcgatggttctgcttaccaggtctgtacctgaagtctgctttgccaattcggtcgtcaaaaccaacggaatggaacgcagatacatttcttttcttgcgtaaaccgccagttttgctacgaattccggagcatttttctgaatcagggactgaattcttgtgagtctttcatttcctttttcataagtggtattggataatcctgttgtaacaacagcactgtatagttcttctgcaggtgtcatcgtataagcttttgcaccttcgtagttcgttactactttattctcttttcttaaaaaattaaatttcatggttactgtttttttgttaaatatttcagaggattatcactttctccctgatttctgatgcaaagtaaggatgcttttgcgcaatgtttttgcgtagtatgatttttttgaaaaaattttatttaaacactaattgcacggattcttgcactaataacactaatctttcttgtgaaatttgtgaaaaaatttgtgggatttgtgtttagaaaaaatctatcattcattttatataaaggaattaataattgggagtttatggaaatacgttttctagatttgtttcattaaaattttaaacttatgattaaaggactgtacgagactcatgttcaggtgagtgatctggaaaacgcaattgaattttacaccaaagttttaggattagaatttgcccacaaagaagaaaaccgaagaattgcttttttatggatcggaaaaaacaaggaatctatgttgggattatgggagcagaaggaaaatcttcaaacaaggcattttgcttttaccgccgacaaagaagatattctgaattattctgtcgaatttctgaaaaataaaaacctgaaaccttataatttcctgaaagacggcattgaaaagccgatggttttcgcatggatgcctgctttggccatttattttaatgatccggatggtaatcaactggaatttatctcggttttggagggtgacggaaaaccagagttgggcgtgctttcttatgaggagtggatggaaaggaaataaaaaaactccctttttgaaaggaagtttaataattatcctgtagaacatcaataacatcttttaactcatcttctttatcagaaaaatataactgtagttccagataaacgaattctttaatttcgagttgaacctttggagttcttagtttccattttgtcgatcccaaataacttaactctcctctgacagcagcataaagtaaaagatgttttttaaatttagcatttgaaatattcatatttatattcttctttaaagcttcttctttgaaaaaatttttgaatccttggaatattccatctaaaagggatcctcctaaaattgtttctttatcattagcataaacttttattttcggtttgatccaatagctctttacgaaggctaaagcaagtgagtatgaaaaatcagtctttttattaaaacttaacttaaaagcaatagaattataaagaaaattttttttcaattcaaaatcaattatttcaaccaagccttttggataatgaaaaaaattaacctgttcattgtcttttgattgatcaatacttctaattttaatatcagaatttaaaaacgcaaatcttcgaaacagataattcaggctttcataatttagctcaaaataatcaaaaattgttttatcgagtgtaaaatctatttttatttttaggaggtcagaatgaatattttgtgtaaaaatttcagctttaccattacatgattttacattcaaaaatttatttgaatcataaacttggatatctgtaaactcagaaagaccaattatttcaatgaatgatgaataaatatttttatcaggatatccattaataagaattaaatattcctgaatatcatgaagactttttaaacttactccttcaacaattaatctattattttcctttagcaagaaatttatttcatttactcctatttcttttaaatcttcaattagatgggtcaacaattctaaaattcctgaataatttgttgacccaataaacattccaggacgtttccttacaaactctaaaagattaattttttccatcacaattaaaatataaatccccttaaatataagaatttaaagggatttttctaaatttagattaagctttctgcaaacaccaatgtaagattttcgcaatatttttggcatcatccacgcctctgtgatgcgttccttcaagtgtaagatttaattcgcccaaagctcttgccattccgacgcttttacgaatcgtgggatgcagttctccaaataaggttttcacattgatgtggtcatcgctcaaaggataatctacattaaatcttcttgcctgattttgaagcatattaagatcataatttccgtaacttgcccaggtcagatcttcggaatcgtattctgctctcagaatatctaatgcgtcttccagcaaaatgccagcgtcatcaagcatctgctgtgtaatggaagtaagttccgtacagaacggacttactttcgaatattgaggtttcaccaaaatcccctcatttttggaaatcttaccggtttttgcatccatgacacaaactccgatttctatgatttcactttcctgtcctctcggcggtcgatcttcccaacacgtggcttcgaggtctataattaatatgttgtctgttgttttcattgttgtaatatttaattgttaaaggttggaagtttgaagctggaagtgaattacatactacaaaacttcccgcttccatcatccatcttccttacaaattatttcctcaaaatttctcttaaaattctggcggcgttgtaagcatcgtctgctccgctgtgatgatttccttcaaaatccatgttcatataattcagtgctcttttcaaacccatcattttatgatgtccgatatattttttgaattgatacatcacattgatgtagttttcggaaaaaggattttcgataccgagataatcacactgttccatgatctgctctttatcaaagtttccgaaacctgcccaagtaagctgagctgagtgatattcatctttgattttttcgcaggcttcttcgaaatagattcctttttcttcgatgagctgcggtgtaattcctgtaagttctgtacaaaatttattgattctagatctttcgggaattacataaatgctttgtttttttgaaatttcctgcgttattctgtttaattcgcaaattcctatttctataatatcggttttttgtcctgcgggaattctgtcgttttcccaacacgtggcttccaaatcgataattacgatttcgtttgttgttttcatgattttgattttaggttggaagacgcgagcatgaagatggaagtttcacactatgaaaatacttccagcctccagcttcagactcccaattttttaatttctcggtgcaaacggcggtgtccattttttccttttcatgatttcctttacttcttcgtaagaaaccggataaaaattatgacaatcaactcctacatcgaagctcagagccatttcatcgtcgggtaatgttccgtgcgaatgtccgtagagctgccaaacgccgcggtgcgaaccgttccatgttctcatggcgtaatgaaagaggatgatcttctgtttgccgttgctgttttcaggctcatcaattttcagttcgtgataatctctgatggaagcaaatcgttttggatgcgtcaatgctgcaccttcatgatttccttttatcaaatgaatgtttccgtttaaccgatccagaatttctttcgtgaaatccggtttgcctaaactgatgtctcctaaatgataaacggtgtcatctttacctattttctcattccatcttttgatgagttcttcgttcatgtgttctaaagactcaaaaggtctttcggagaattttataatattttcgtgaccaaaatgatggtctgctgtgaaaaatatgtttggtttcattttttaattgtttgttttttaactacaatatttcactattttctctgtcattctgaacggaacaaagtggagtgaaaaatctctaaaatctttatgtgagattctctgaacttcgttcgtatcctttcaggctgtgtcagaatgacaaacttgctgattaaaattgcagttttagtttaataatattaattcgttaaggtttcatcaccatccacagatctttgaaatccggaatatgagttgtaatcaatgataagttgtgtccggagctttcttttacttcacgggaaccccattcaccgcgctgcctgtaaggaattacttctgcccagactgcttttgacggatctatcgccaataaagctgccacagtatcatgaagtgccttttctttgagttccactgctttaagaaacagcttcaatcctttattttcatttcgaaaaggaatcaggatttcggcatctttctttgtaaaaacagcagcgtgacaaacatttttactgatcatccgtctctcagtcattgggattgagagcagcttttcagcagccaatggattcccattcagattgaatgtcgcacaggtaagttttccatcaaatttttccagtcgatgttcttttgggacaatattatcgcctgcaaaaccgccctgacaaaaccagcgatcgaagaaaactccggtttcccacaataaatgcggatttgtaagtgctgctcccgtcagtaaagtacaatctggaaattgatgaagtgtttcattcataacgtttgctgcagtatcatccgcttctgaatcttcaaattttccgatccagtctcggtaaaaacccgaaacacggctcgccgaagattttggagttcctgcgccgacgcggacatcttccctatccagaatttgcagaacacgttttacaaatcctatctgatctttgcctcccggatgtatggatacgcttgcgagatgaaccttaggatgcgttgccaaaacagccaacgtcatcgaatcatcaggatcagccgtttccatatcgaaatgaaaaggtaatttattttgcatgattatttttagtttttttaattttagttaaataaataattttaattaattgatttatagcattatattaatttatcgcaaagaaaaacaaaagattttttttgaaagtttataagctaaacaaaggcacttcgtttatttaaaaaagacaaaaatggtattactttgatcaattttacgcctttgtatatcttaaaagctgaattcctgataattgaaactctttgttttgcctcgcgtttaagaagacttatcacgaactcaggtcaattaatttccctgaaatgctttataaaaagcggtttcaatttccagttggtcgctttcaatatatcttcttgaaaagtgaataggaacagcctcttttacttcacattctttcatgatttttccggatgcagatgcaaaactgtgatgattgatcttcgcaaaatcctgatcttcatctttgtagaatgtttcaatgtacaccatatccgcttctctgaaaaccgtttttatcttttcataattgtcttcgcagaccgcgtgatccataattacacctaatttatatcctttgtttcgagtcagaaagtgaaataaatcggatgctttataaactgttccttcgatttcaatttctttgccggaatcgttgttttcaaaggctttcttgagttcgcttatccattttccttttttgaattctaaaccgttttcattaaaagtcaccgaatctttttctctgaataaataagcgatggaatctgttttgtgatccaaaattgcaaaatcaacattcacatattcgtcttcaaaaaggaaattctgggtttctatcaattccagattccaatgtggaggacgaattttatagacattaatttcttctttagaaacgatttctctaatctcatattcaatggctttttcatcaattaaattccaagtgtaagattttaatcttgcttcaatctgctgatgaatatttttcggtccgcaaatcacgattttctcaccacttccaatctgatgtctgaaaattccgtcaaaatttgaaaagtgatcaatgtgagtatgactgatgaatattgccgaaacggattgcacttctctcaccgtcagtaaacttacctctccgcaatcgcataaataatgctgtgctgaattgggtacttttattaatatactgatgtcttcttttaaaagactctttatttctgcctgtaacattttttctaatttttttaccacaattaattatttctgctgtcattctgaatggaacaaagtggagtgaagaatctctaaaaaatattgtgtagattctctgaacttcgttcgcatcctttcaggctgtgtcagaatgacaaactttctgcatattattcagatcagtttatggttcaatttaacacgtaaaaagttccgataaaataaattaccgaaacttcatctttattaaacaataagttcttttactgatattcttcgtacaccaaagtcagattttctgatcttgcacatacggttgtcagcagtatgatggaaaacgataccctccatatcattttcgggattgctcagaaagctcttgataaattcaaagtccagactttctaaactaagaatatttttgccatgttttaccaataaatgacctttaatattctcaggatttccttgtatcttttcaccaatgagttcgtacgttccatcttccaccctgcccaattcagccaaagcagtgaaaccttcccagaaatattgatcttcttttttatcaatatcacacgctatccaatgcggatgatgacctgtaataagatctgcttcctgacacggaattgcgccttcaggagctgtttttccttttttggcatcatatcttttgtataatttaccgttgattactgcacatgcagaaccatcaaacttttgtgtagcaacagctttcccatcaaaaacccagttgttttcaggattaatttcgttaataactcttcctaaattatgtatatctttttttgaataatgtacttatctttttcatttttaatagttttaatcacaaaagtttttattcatcggcataaccctcaaaactatacttttgtggaaattaattcttcttttacgatgtcaatcactaaagaattcagttttttattgattcttttctgttcttctttctcaatggtttcgaaaactttcgggaaatctttttcaaaatcttctaaaatatcctgcgcaaaaagaccaatgacttttccaatcattttgggttcgaattcaccaattttgctgaccacgttatttagcctgtttgcagttgcatatttttggatttctttccagatattctgagctttctcactaaagctgatttgcttttgagcggttttttcctgttttcttaccactttagatttttcaatccatttttcatttttatttttcaggatgactcttgagccgtttccaaaatatctggtttttaaagttttcacaatggttccttcacacctattgttctcgatttcaggaagtccaagccaacccggaattttagaatcgaaaacattcggaaacttcaaagtatcttccaaagttccctgaaaaagaatttttgcatagaaaaatccggtttcttcgaaaatttcattcaccacatcagtatccagataagtagttccgttcagcttaatgtcgaatgcgtaaaattcgttgtgcggagcatattcaatacctttctgcacttttaccgcatcttttacaggttccacttctttgtgtttgtaacctccgccgaacaattcaccgtagatcacaaccgtttcaacatcgggatgaatatttttcactttttcgaatacttcgatgacgttttttctgtaacgttctaaaatctgatgtgcgttgaagaatttttcatccttttcgatgaaagcagttcttttgccgattttaatttcctttccgtcggtaaagaaagagaaattagctccgtgaaccttctcctgcacgatgaaaacctcatcccaaaaaccctgaattctgatctgatcgattacgcgggtctggtaagcgttttctattgagttatatgttttgaaaatcattttttttaattttttgatttgtttttacttaaacctcacaggttttgaaaacctgtgaggtttcattactgtatctatcagcctaaaaatatccgttaccattttttaaagttttttaaaaggctttcaatattttgctttccaacaggattcatggaatggcagtagaactgtggcaaatccaaatagttatccatgcaatattctactagccattttgcacaatcgtagcctgttttttccacaaattcctgagaatcggatttcaaataatgttcatcggcaagatcgtggtcaaaagagatcatttccggaagtcctttttccaaaatcctgctgacaaactgttcgtaattccgaacgatatgccagtcttttctgaggaaaatatcctgttttgtatagtgatacgcttcaacaggatatcgtatatcatccagaaacagtaatctttttgttagttccattgcttattttttttaatttgaaaagtaaatgttcaaagctttgataatacttttcacatttgtattcggataaaatccggaactgttgatgcagttgatttcaacaatcttccatccttcatctgtgaagcaaatatccattacaaaagcttcttccagattgaaaagctgaatcatttcattggcgaaattcaatccgtcttcagaaactttttcctcaaaaggaacattatcattgaatttataatatccggcatcgataatctgtccgccaacaatccaaagtcttgcttcttttattgttcgttttgcttcagaaatctgaaccaaagaatcttctgtaattctgttggtttgattttgcaatgcttcaaaagcaaaatctttctattccgtttcgttgaagacttttcctgtaaaaattttcgcttcattgtaaggtttgatgaatttgagttcatcttttttccaaatcaattcttccgaaattttatgaacggaaactttgtgattaagaaggttttcaccatagtatttggaatacacttcatacaaatgattacctccgtaaaaagaacctggaaaccaatctgtattttgctttgccaatcttgcaatcgtcaccgaaccgtatacgaaaacatcttttctgtctgtttcgaagtcaattttttgtgcggttggaggaatattaattacgctgtaatcaatatttaattcttccaaagcatcaaaaattttgtaatgatcgggatctaaatatacattagcctgaactaaaaaatacatggttattagtttttatggttctttttatttactctttacaatgtttgatagctccagttttgcatcttcaggaaatcctgaaagtccgggaatatcgttgtattctacaattattttttctccgttttctgtttccagaacatcaatcgccacaatatctgctttgatgttttcctgtaacagttttactttttctatccattctttttcgggctcgatgagttgatattgctgagttaaagaattggctttccaatatttgccttttcttttcattgcccagactttatcattgacagccagataacggatatcatattgataatcaataaatttctctgtcgtcacgtaatcctgatgaataaagattaaatctttcagttcttcccattgttcttcggttgaaacaagactttttccatatccaccatgatgatttccaactttaaccacgaaaggaaactgcatttccagatttttcagttgggttgtattggttgctacattaaaatcaattacagaaaacccaagttttttcaatctatttaacatggataatctttcgtaacccattaataatgttgaagctgaattcacacatggaattcctgaatattcaatcaattccaaaatgtttctttgctttgcttcaggattgatcgctcccaatctccaaaaaataacatccggtttgcagactccattctcatcaatggcatacagttcagcattttttacgataaattctgaggtctgaactttcttctgaaccacgttaaaacctgcaaaataatcctgccagtatttttctccgttgatgattaaaattgttttcattgttttatttttttggatggaggctagaagctggatgaaggaaattaaattcatactgttaaaaaacttccatctcccatcatcccgcttccaacttatcacaccatcatatcagcacaattggaacttgcgaaggcgtaaggttttgctttaaacacatatcccattcccagaatatatcccattgcgtctctcaaggcaacattggatttgaaatccggatcggtgttaatgtctgcgtgtacctccatttccactccataagcatccagaacagcgcaaatagcgtaagcaatttctacggatttgttcacctcgttcagcatacgttctttgatactgatagtctgtatttctctttcttttctgataaaggtaaacgctccttttccctcacgaataaatactactgccgtagcataattaatggcttccccatatacatgggaatctgaacctacacaaaccttcagtcggtgtccatttgcctgttcgcggatgatggcttcttctaccaattgggtgatagagttttggaaaatttttcctgtcatgttctgccatacttgttgttgcgtttccattttttctacatgttttgtatttgtttaaatatttattttaacgcaaagtgcgctaagtttttttacctactatttgtttttaagttcgcaaaagcgtttcactcagctaagaacacaaagcttttttaaattcacttgcgaagcaaattgaccattgaccattacattcctgcactccgaaccggattcgaaccaataccatcagttttggagactgagatgctgccattacactatcggagtagtttttgttgattcatcaggactcgaacctgaacaacaagagtcaaagtcttgtgtactgaccaattacactatgaatcaattttataagtaatgagtaataggtaattagtaatttttttgcgcataattcattacttattatacactacttattacttatatctcgtggaacagacaggaatcgaacctgtacctttagtttttcagactaacgtgcagacctgctacaccactcttccaattttataggtaatgagtaattagtaattttttttgcctgcaatttattacccattgcttattaccgattacttatattctgtacgggaagagggattcgaacccccaaaaccttgagcctaaatcaagtgtgtctaccatttccaccattcccgcggattttttatgaatgataattgattaagagataaatgatttaaaacataatgttttcatcaattataatctatcattcatcattaataaaattaggttcgagaaaagcctgtctatatttataaactatgcctgtaatgttttttaaagatcttctgcgctcgacagacctttctctttccatttaacctatttctttgtgaattgtcaatcgtcaatttacttcgtagccaattcttaaattcacttgcggaacaaattcaccattcatcttttcactttcctgtactctataagggaatcgaacccttgttttctgctcgaaaggcaggcgtcctgaaccgttagacgaatagagcgtttttgttgtgaattgtgaatagtcaatttctttgcagtcaattcttaaaattcacttgtggagcaaaattcaccattcaccttttcactttcctgtactctataagggaatcgaacccttgttttctgctcgaaaggcaggcgtcctgaaccgttagacgaatagagcgtttttgttgtgaattgttagtagtcaatttctttacagtcatttttttaaattgacaattgactatttaccattcacttttctttgaccatctgaccaggagtcgaacctgaacaacaagagtacatttcctgcatgctgccattacattatcagcggtgtggtggaagtagtaggattcgaacctactcagcaatgaagcaacagatttacagtctgccccgactctccagcttcggcgtacttcctttttcatgagtaataattaattggtaatgagtaatattttccaactaacttttttaatctttaatttttgaagaaaaacaaagcctgtcttaatttttagtttgatgtaagaacttctgcgctcgacaaactttttctttcttcggaactaatctcattttagttatttgagatggttatgggattgttcataacctttttattcttttttatctgaattcacgaatgtttcacatttcaaacccactcagcttacgcaacggttttgcagaccgccccgactcttccacttcggcgaaccatcatttttatgagtaatcagtaatgggtaatgagtaatttcccaatattctgattattcttttttatttaaattttcattaaaaaataaagtctgtcttatttttttgtttgatataagaacttctgcgctttgacaaactttattttctctaaaaatttatattatgtcacaacttttttcatctattttcagttgagttaagaaaaagcctgtctatataatatcgtgtttttggctaaagatcttctcctctcgacaagccttttctttttctctttgaaacaattaacttagtgtgaattgtgaatagccaattgtcaatttgctttacttatcaatttttaaattcacttacgaagtaaaattcaccattgaatattcacttttttgcactccataagggaatcgaacccttgtcgttcggtagaaagccgaatgcactaacctctatgctaatggagcaaactgtctggaaagcagggttcgaacctgcgacctcccgcgcccaaggcgggtaaacatccaccgttatctttccagttttgcagattcactttcattttcttttccgggagacagccggagccgaaattttccgtgaatctttgcggtctatgcgagaatcgaactcgcagtgcccgagagacagtcgggaaggttaaccattacctcaatagaccttttgtgattccgagaggattcgaacctctatatttggtttagaagaccaacattctatcctgttgaattacggaaccattttgtaatctcagaaggattcgaaccttcaacctttggtttcgtagaccaatgctctatccaattgagccatgagattgtttttaatttgtgaattgttaatcgtcaattcgtcttgctcgtcaatttttaaattcacttacgaagtaaaattcactattaactattcacatttttagggtatctccggggatcgaaccctgttctccggtgccacaaaccgacgctttaccaaataagctagagaaaccatataccataaaaaaagcgcctcttttcgggaggcgctttatatttctggacgtgtcagttcattagctgacccatgtatataagcacctttttcccacaaattcactatcaagaagaataacacaagcatatctttgccccatcggttctgtaccgcgttgtcctgaatataaattagatatgttatgtaattgtttcattttattcttgttgttttaaaaatgttttttgaaaggcttgaaaacctgttgctttcaattttcggttgcaaagtaaatatgattttttttaactcgcaaatttatttttcatttaaatatttgaaaatcaattaattatgcgataattttagaatagagaatttccgtccacaatactttgcagatgtcttaaatacctaaatgactgtctctcatcgggttactgatcacgctctattttcttattaattgttcatttgttattaaataattttcatttttatggttattttttttcattctaaataatttctgctctaaaaacacaaaaaacgcctcggtaatcgaggcgtttttgcagtattttgataaaatttttacggttttacagtaaataattttcaaagcaagcacatttcgcctcataagatatcatccattcatacccaaacgatccctttagtacagggcgatcgcatagatttaaactgatatgtgctctttgtattgtcattattttatggttgcaaagataaatctttttcttaaaagttttttattttgtcattgcgactgaaagtgaagcaatctatattatgtcatttttactttgagattgcttcgtcgccttgctcctcgcaatgacaaacaaatcaattcctgaatatcctgttccttcccgtcttatacctggaaatatctttcaaaatcacttcatcatccggattgaaatgcttcagttcattcacgatttctgagcgggttgctactttttcggcgatgatttcgtaggcgatatttcttgtggtcgattgaagtttcggatcttttttaaattcgtgcttcatggcttcaagataagtaatctttctctctgaaggcgttttctgataaagttcctgaatctgctgattgagttttttcacatcaaaaatattggcaaaataattattgatacagttaaaagcatcacggtcttcttcccagcctttcagcagaattttctgtgcttcatcgggcaattccatttttttacggtaaattaaagaaccttttaccatctgactgttgtttacataatcgtccaccaccatctgataatagatattggcatttttggcatcattcattttcctgtagagatcacctactttttctttctgttcgagttctttgtacaaatcgattgcttttttatactgctttgctttttcgtagcagtttgcggcttccgatttattcttcagttttttaagataaattactgcggcttcattgtataaacctccgtcttccagtgtttttgctccgcgatagtaatctttcatcaagttcatgtatacttttgccgctcttttataatctttttcgctgatgtatttttgggccagttcttcatatttattcctgatcttatcgaaaagggatgcttccagataaaaatttccccctccgtttctgccttttcccgaagagttgctttctttttcctttttttctaactgcatgagtaccacaaaaatgatgaacgcaacaatggcaaaaatcactagagttcccaccacactccaaaaactctgatggaaaagctgcgccagaattccgattattttgatgatggcgagaatgaaaaatgccgccataaatttgtctgtaaatttctgtctattcatccttatcagattttaaaatggtttcatcttcgctgaaaagacggtaaagaagtaatacaatgccgataataagaatccatacaaaccagttgtacccgaacatttcgatcaacggatagaaaatatacgccaacatggtaatcagaataatcattaggaaaatcttggttcccgccggaatattgtctccgcctacattcagcgattttcttttgacgaagaaagaatacaatcctaccgctcctgtcatcgcaacaatcagccagaaaatttctgtaaaagaggtgcttttttcttccggattacttttttcagcgttcagtgtcgaaatagcaggcggagactgtggaagttctttcgttccgtacagccttcccaatgaatcttctaccaaaatggctttctttttcataatggtttttacaactccttcatcggcaggtttccctgaacctgatttctgaatggaatctttaattttctctctgattttcccttcattctgagccagatattttacaattttctttcgatatactctttttaatgaatcggttgccgcatctgttttgtcattcagcttaaaaatatcattctgaattttatcaagcggtcttcctccattcttgagatattcctgataacttttttcacccggtttgctcatgcttagagaggcactcatatgttctttcatcagttctctccgcttttttccgtacatggagtcgattttcatatcaatatcggtaactcctgatttgtacgccactacaggagccatcattgttttatcccgagtctggactttacctgaagaaatggattgcgattctttagttccatctttattaagattcataaaaacccgtgctaatccgatcattaaaagaaccgcccagaatacccaacggtaatttctaccggaagattttccatccaaattgtcttcctcttttttaccaaatagtttttcgagccatgaatttttaaatttaaaaatcccgaaaccatctcctctcgaagttcccataatatccaacggaacgccaagttctactgctctgtccggatatttttcgatatattttaaatatttttcgatttcctttttatttcccgccattacctttttcatgtcaaacggaagatttttcatccattcttcttcggtttgcggtttttcgagagattccagaactttttcatcgtccatttcaacggtaaaactttcgattttctgaggaatctgtactcctttcgagggttttcttactttatcttccgagatttccggattctgaataatggaaatccagtcgatttcttcatttaatttaaccaaaccaaattcgggatgcatgatgagatattccgcatctatattctgccactcttcaggatttactttcggataaaagaccgtattttccggaatgaaaaatctattgtctacgcattgaaaataagaatttctgccaatttcgttcggagccagatttttaaacaccaaaaaacatccgtataaaatattcggctctgtggaaggaatcgggaacgactgaacatcatgtaaatctattcctaatatttccatttcatgaagccatacaagcggtgaagaacctttgattaaaagtccttttttggggtagttatttttcggaaagggtttaattctaagttccatattcccaaatttgatctataaaccgttccatatattcaacatacatttcttccattgttcttactttcagcagtgtattctgtggcagataatattctgagcctccgaattccgtgttggttgccaacgccagatttccatattctgtggaaggaatataaaattcggggatatttttattgctgcttttaaaagtcagcattccgcgattatccgtgataatttcgcttccgtctgaaaaggtaaatttgtttttattctgctccgcacagatttccagcggataattatttctgtacaacgtgatggaatcttcgttatataatttgtttaattcgttatttgaaatgactagctttttttctgtattgattccgatattgtggaaattattcagaatttttaatccactgtggattaatttgttaagttcagatccaactcttaaattatttttataaatttctttctcattcacaaatgcctcttcaaaactaacatttccatctatagcaattttattgctgtaaggaatatcatccaaatgcagataaaaacttttattaaagtaaataagttgacttttgaccggaatattttttcctgtcaaattcagctcagaatattctttagtatttaaattcaatttggaaatcagctttttatcgggttgatactggcataaaataaagtctccctgcttattttttgccaacgcaaactgaccttttggttttacggaaatatcatcaattaaaacttcgcagccatgatgggttttatacgtgtcgtaataattccggttgtaataattgtctgaaagataggttctcagcaactgttttttattgcttaaaataaaaaattccccttcatatagaaaggttgcgattttattgatcggcgcaggaaacaaaatcggataattgaacggaacatttgcttttttgccgttccctgaaaatttactttctcttctctgtcttcgttccggcgggtttgcccacagttcctgcaacggaagcatgattttctggatatgctttcttgttcctttatgatatttgaaaaagttcagttcaccgtttgcagaagtcgtcaccaaaaatttcaggcggtctctgttttcgtgaatgattttctgaagattttgatggcttaaattttcatgatttgtgatgaaaaaaacttccagatctttttctttatgttcttcattaaaaaacttttcaagtgcgcctgaaacttccagaaccggacttacatgattgagattttccaccacttcatccactttatccagagaaatcgggatgatattttgtcccaatgcaaaaactttgcattcggaaagtgctttcggatgtttgatgactgcaattgccgatgcatatgccaaaactttcggcgttccccagtttttcagggaagtatcaattaaaatgattctttcaaaaatattttcttcgggcggaatttctctttggataaacaacgcttcattgtttgcaacacggttcatgaaaatatcatcttcattggcaaattcagacaaaagcattctgtgaagttcgcctttattcgtcatatccgagattcctccaattggctgttctccgggcgaaagatggcgcatcgggattttcagaccgctccagatccttttaatcaaacttccgacctgaaacgttttcggctcttcaataagttcctgaataaaatctttatcggtttcaacggtggtttcttcttccaccacttcatcttccaattccgaaatatctgtgaaacctttcatggcattgataatggattttctagtcggaaatttattctgaagaagcgctaaagttttaatatctctgttaaccgcaatggaagtcagaggctttttaacagcagcttcgccgatgatgtgaggcttagtttcaaatatttttaagattaaccctgaatttaccgaggaaacccgattgtgactgtctttaaaaatggtctgtaaaagaatgattttattctgtccccgctttaaagaacttccgatactgctcagattttctaaaaatttaatggcaagatctacatcggattcattttccgcaaaattatctttctgtctgttcagataataaaaaacgccgtctaaatttaagttgccatcatgaagcgcatacaaaacaagcaataaagaaccgaaaggcggaagcccctgttctttaagttccttaagaatttccattacgtaaggtctgtacgcaattgcgcctacattcggaatcgaaataaggttgttttcattatatcgggtgtcgtccggaacatcttcatcggttgtccactcccagaaataattgatatatgattggaaataagcaattatatccattcctgtaatttttcagtcagtcggaaagagcttacggataatttccggaaatcttctttatttaggtaaagaacatttccgttttcgttccataaaagccactgatcgcgacctgcgttatattttctctgtaataaagagctcatgtttttaaattcaaaatcgtaacctgtcggtaaaagatgctcgtcttttgaccaaaatgtttttcccggaaaacttaataaaggatttccgataaataacgctttgtcattaatcaccatccagtcgattttctccagtttaaatttcggcagcgcaattatggcttccctgatttcttttattgaacataacaatgctgttgcgggatgctcttcttcgctcggtttcagcttaatttcaatttttccgtcaattccgaaaaaattatggttgaatgaaggaaaagttaagcgcaaagctttatcaatgggagtccacagtaaagccgttctcatttttttgctcggaaccaaagcgtctttccggaataaaagtccgtctcttaattcgtacagcaggaaattcggcaactgttgaatttccgaggaaaccgcctgttcatcggtgaaacctttcagccagacaacatcttcctccaaagcgatctgaacatttttccagtcacggatcgagcccagaacatcttcatctgcacgcggaatttctgcccagaattcttttagaccgtttgaagaatcttttgccatagattttcaatttcttgttgaatgtactgtttctgctcagggtttctgatccactcgcatcgcgtctgaaggtatcttagtttatctttaatgacattctgctcttcaaaacttaaagaaccctgattccatttttcgactaagatttttacgtctttcatcacttcttccggattcggcgttttgttttgcaatgcttgtggatgagatttcggatgttcatctttttcaatcgttctgttgatgattccttctaaaatttcgatctgttcttcggtatcccaaatatgtttcagcacccataaatctgataaaatcgcttcatttctgccacaaattaaagcacttgccgcgataaggttctgtaattttacggctctacggtcggaaatggcaattcctgtatttcgcagactgatgatggtgtttaaataaacttcgtaaatgggtcttagatcgactgttttacacaaattctgaagttcttttatttcgtgggaaagaatttcgggagtttcggtttccagattattttccagttttcttccggctaaaagcacctgatgaagaaggtcgggatgaacataatctacattaattctgatgagaaaacggtcgaacaacgcattcaatgcttcgtcttcgggaagaacgttactcgctcccacgaacatgagcgcaggaaggtgtttggtttcttttcctcttttaaaaatcttttcattcaaagccatcaaaagggaattcagaatggctgaattggcattgaaaatctcatccagaaaaaccatagatgcttcaggcatcattccttcggtattggttaataattctccttcttttaattttcgaatatcaaaaggaccgaaaatttcgttcggttcggtgaaacgggttaataaatattcgaagttttttccgtcttttacggtttttgccaacgttcttacaatggcagattttgcggttccgggaggtccgtacaaaaaggcgttttctcttgccagaagacagattcccaataaatcgacaacgtcgttttttccgacaaaggtttctttgacgtggttaagaacggtgtttaatttttctatattttgagtcatttgtttttatgttataatttttgggcttctttttttaatcgtaattgttttttaacgcaaagtccgcaaagtttcttttaactactagctgcttttaagttcgcaaaggtacttcgacaagctcagtataaacttattcacttagcaaaggaaacaaagtttttatttactttctatatattttaaccattaagatttattaagggtttaagattagttaagagaaataaatttcttaagcttgcctttaatttgcttgcaaattcttaattcgtcttaacttcttacttattcttaattgtttaatttttgcgtgattttaggttttgaacgcaaagaccacaaagtttcttttaactgttaactgtttttaagttcgcaaaggtacttcgacaagttcagtataaactattcacttagcaaagaagaaaaaggttagttttctgttgtttttaattctttccaaaatacatctttatgcagtccaaattcagcaattaacaactgattgaggtaaggaatttcagcaagccgataggatttcttttctacaattctttccagatagagctttcggtaggttttgtcttttaattcttcttcccagttggtgtcttcgagatcgagatcaaatcctactgctgaatagtgaaattgtttcagaatattttccagcattttcaccaaaggatcttccggatctgaaacctgtaaagcagaaacaatctgtggtaaaaaccggagtgataaatctgcggacaggatgcctgaaacatctcttttccctttgaaagacggaattaatttgtttaaatctttagccgtattttctcttattaaatgaagctgcgcgctgtgatagactattttggcagcccagactgctgtttctgtatcgcagaaaagtgtatcggataaaaattcaagcctttctttttcaaattcagcctgaaaataatctgcggcatcctgctcttcttttttggaaatttcatgaatatctgagaaaatggtaatgcattcttcttttcgaagcagaaataaagtgtctaaaaaagctgattttttttccatcatttaacaaaaataaaaaatattcttttcgaattgaaaattttgaaggtaagttgattataaatctttaattaaaaaacattgttcaaggattaagaaatcacaattttatatctttgccctttcaaataaaaaattatgagtatccacatcagtgcaaaaaaaggagaaattgctaaagttgttttacaacccggagatccgctgcgtgccaaatacattgcggaaaactttttggaagatgctaaactggtaagccagaccagaggaattttatactacacaggtttatataaagggaaagaaatctctgtgggagcaagcggaatgggctttccaagcatcggaatttactcttttgaactttttacagagtatgatgtagatacgatcatcagaatcggaacctgcggtgcgtataccacagacctgaaagtgtatgacctcctgaatgtggaaaatgcagcgagtgaaagcacctacgcaaaattcgcatggggaattgaagaggaaagcatttctcatcagggaaatatcttcaataccatcaacgaaacggcaaaagaaatgtctttaacggcaaaagcgacgaacatccacagcagcgatattttttacagaaaagatcctgcaattccagccattgctacaaaatataactgtccggcggtagaaatggaagctttcggattgtttgccaatgctaaacatttaggaaaaaatgcggcaacgattcttacggtttcggatattattcctacccacgaaaacatttcggcagaccagagagaaaaggctttgaaaccaatgattgagcttgctttggaagcggggattaagagtctgtaatcattatcaatcatccaaaataaaaaagagttttacatcatctgtagaactctttttttatatcctgaaaaaattccgggcgacttccgtggtttcatctgcaacttctgctatgccgattttcttcagatgggcaatcgtctgtgctacatacggtaaaaaggaaggttcgtttctgcggttctgcattctcggcatatttttcggcagcataaatggtgcatcggtttcaatcatcatccggtcgagtgggacatattttatcacttcttccaaatgtttaaacctgttctgatcgctgatggctcccgtaaatcctaaataaaagcctttatccagatatattttggcttcctgtaaagttcctgtaaaacaatgaacgacggcttttggaagtttagacaaatattcatccgttatttcattaaatcttttgaaagcagatctttcatgaaggaaaagcggtttattcacttcaacagataattcaagctgggcgcggtaacatttttcctgaacaggtcttggtgaaaaatccctgtcgaaatccagtccgcattctcctacggaaacaacgtggtcttgttttaataatgtttttaatgcaggaatgctttcgctgttgaaagattttgcatcatgaggatgaattcctgccgttgaaaacagaatctcgggataatcttctgcaatttccgcagactcctggcttccgcgaacgctcgttcccgtgagaatcatctgctctactccattgtcgagtgcgcggttgattatttcttcctgttcgtcataaaattgtttattggttaagtttataccaatgtcgattaatgtgttcatttctttattaaatttagttttattggacatatttcttttgccttgaagcaaaagaaacaaaaattcaagacctggaatctgaatgctaaaaattaataatgttctctaaaaattctaaactcgcgcgaatttcacatttgtccttcggttctaaatagctaccgcgctcaaacagtagaatttttttgacgttcgcatgattaattttcttaacgcttcagcttcctatgtcggcttaatgaaataaaatctgcgtcatccgcaaaatctgcgagagaaaaagattaatcataaaatgtttttaaaattaaaaaaaagggaaacaggcaggaattgaacctgcaactcatcttagaatgatgcgcttttccattaaactactgcttccgtatgaaaatttaagcgtttataatattttcaatcatcatttttaattctggaagtgcttttgaactgctttcctgtaccgaaaataacgttttgcttccttttaaaatataatcaaaatacgtatcgctctcaggattgatcaggacgatccattttgcacgaatttttaccgtttccacaatgtttacaggcaaagccgttgatcccgaagttccgactacaaataaaatatctgtatggtctgcaatgttgtaagccgtatcgaaatgatagtatttttcattataactttcatcaaaccataaagtatgaggacgaagccagtttccgcactttttacatttcagatcgtcgatatcatctaccgttaaatcttcggtatactctttaaatttaatattttcaggaaaatcgaaaggttcgctgcattcttttgaacagcgtactttctgcttgcttccatgaatttcatagacattctgcgttcccgatctttggtgaagcccgtcaacattttgagtaattagcttaaatctttcacctaaaagcttttcaatttccgtaatcgccaaatgtcccggattaggttttgcttcggcaatcattttcttccagaacagattgtactgccatacttcttcctgattctggctgaaatatttatacgtcccgaattcttcaggacgatgatattttgttcctttaatccagattccgtcgatcgagcggtaagtcggaagtccgctttccgcagaaattccggctccggtaaggaaagtaatgtatccttgtttttctttgaggattgtatttaatatggtttgtaattctttcatgattttaattttaattttcttttgccttgaagcaaaagaaacaaaagttcaagacttggaatcttacgctaaaaattaataatgttctctaaaaattctaaaactcgtgcgaatttggtatttgttttttgatttaatattttaccagcgctcaaacagtagaattttcttaacgttcacatgattaattttcttaacgcttcagcttcctatgtcggcttaatgaaaaaaaatctgcgatagaaaaagattaatcctaaaatgctttttaaatttaaaaaaacagaaacaggcaggattcgaacctgcaaccctcctgtgctcggagtgcttttccagattaaactactgtttcttatttttaggtttcagcttccagaagaccgaaatattctgaagcggttaaagctcttactgctccacgtggcggaatttttttattcagttcgcaaatcagcagatctccctgtctttttaaacatctgatgtgcgggatgatgttttcatgaattctgaaagtggatgcaattgccgttaatgcatcgtctttatacgcttcttcaatccacagccaatgttccttttccgtagagggacaccagcattttacagcataagagtagcggtttgcagaaccccagacgaatattccgagtttttcattttcaacctgatgaacttcatactgattgattttcttcgtcatatattcatttccattatcatcatatccaaaataattaacctctatttctgcctgattgattttttcagctttcaggtttttcattaaattcccgactccgaaataactgaaacagaaaagcttaaagtttcggtctttgtcattgaaaaattcatcaaaaccaattggctctaccttatcccataatttttcaattctatttaaaacatcattaaaaaccggagtattgtaatgcgtccactctcttgcaaattcccgtgttttaaaattctgaaagctgctgtgtctaagttttaaaatagaaatcagctttttaaaataatgacgttgcaaattcaaaacaaaagtaaaatttgaccttccgacaataaactgatcttttgtaatgcaaaggctgtccgtaactctaaaataaatattttttgccacattctccagtccggtatgcgttccgtaaaaataatgcgtaacctccttcaaagaaggaaattcggagcctgctaaactggcattatctaaaattcctacatattccagcgctttaagctgaacttttgaagaacccaatattcttccgctgactttctttaaatgatcaaatctattatgagtataagcatgaatgtctaaatctccgccaatttcaacaatattcggagccgaaatctgataggtacaaaatgtactttttatcttttccagtgcatttaagtaacaggttcccgaaccatgatttttcaatgctccgtttatttctttcaatacgggaaaagaggctccggatcgatgattaatcataattccgccagagatttccaaagcagaaaagttaacatacgaaccattttcaagatgaatggtgcccgtcatttcctgaagttcaggaaaagaaagttttgcccgcacaaggcgaagattacctgtcatttttttcagcagaggaaaatcatgggtacattcatcggctaaagaatcggtgatttctattttaagccctccatgaacgaattccagattcggaaaggaaatatctttaccaaaaatgttgattcttccgcggatttcctgatgcggtatcataatatgatctccgaaaatatcaatattaaagatgccgtctttcggaaggtttttaacttcatactgatggtttatcgggataacgactcttccttgtaccaactttttactttttgcatacacggcagcgtttttcagttcaatgcttcctcctattgttgctaagtttttaaagctgaaatcaacaatacatttaaaattacctcttactttttccaaccggttcaacattgcagggcaatgcatcgtaaaattttcttctaccattttcagctccggaaaagaacagttaggagcatctatggatagattcccttttacagactcaagattcggaaaattgcagccttcccctctcaacacgagatttcctttaatttcagtacaatcaaaggttgtgtttttagcataaatttctatagatgcattctcatcaaaaacagcttccgtgaagtcttttacggaaaatattttatatcgttttatgggtttagtcgtatgcattttctatgagtcttgttatggggttatattcctgctggatatattttacaaaacattcgctttggatgcggagcgttttgtgttcgttatgcgtgataaaagaatcctctgaagtaatgaatgtttccgttactccgtttttatcataaatactgtaatttttagctttcagcatatgctggttgcttgttttttcaagacagtaagttttaaaatctttggtgaattttgcgaagtcttcaattggattatgattattaaccggtctttttctttcagttctggttaattctttttcttttttttcaggcttttccaatgttttttctacagattgaggaacaggttttggcaaagtttctaaaatgacttcttctgttttatgtaccaaaggtttagatgtttcaggaagcttttcaacaaccggtctttctttccactgcatcggaaccggggtatacacttcatcaataattccgaaaaaaactaatactttttttaacatggcttttatttttaagataaagcaaaagaaggccgggatcgaaccgacaacttattcggtcggaatatatttttccggattaaactacaacttttgtcttatgtattcattgtgaaatgggcaggattcgaacctgcagcctctgacttggaaggtcagcgctcttcctttgagctaccatttccttttttgggagacaagcaggactcgaacccgcaactcattttagaagaatgtatttttccatttttattactattgtctccattttgagagcgcagcaggactcgaacctgaatttccggcacgataagccggtgtccttccatttagacgatgcgctcttagaaacgtgcgggactcgaacccgcaacccttagtgaggaagactaatgctcttccattgagctaccgtttctgtttggggagataagcaggatttgaacctgcatctattccgtgcagggaatacatttttccgattaaactattatctccgttttggaaagcgtgtgggactcgaacccacgacctccgccgcgacatggcggtattcttcctgctgaactcacgctttctatttggaaactcaacaggactcgaacctgtaactttacatagtatatgcaatgtttttccatttataactatgagtttctttctaaaaagtacaggattcgaacccgtgaccttctgggcgtcaaccagatgctcttcctctgagctaactttttatattttaccattcattaattttataatttttcaataaaactccgctgaaataatgtccgttgattccttccacaatcggatgcataattctcgcagctccgtccacagaatccaatggcggaatgtatccctgctcaaactgtttctttcttaaactttccttcgctcctgtagaaatccatcctacatctactgccgtcatataaatctgatctttttcaaattctttagcagaagtaagcgtcatcatattcaaagctgctttcgtcatattggtatgcggatgaaacatcgttttgttgttatagctgaaaataccttctgaagatgttacattaacgatgaatttttctttgaaagaagaagccttcattaaaggttttaattctttgatcagaaaatatggcgcaatgtgattgattaaatttacctcaaccaattcgtacatcgaaatttcttccagtgtggaattccagcttgttttatcacgattatccaccggttgtccgaaacgcgttaaagcgacatttgtttcttcattttccgcatattccaattttccgacctctgcggaaatgggggttgcgttcggaatcaatttatgattgtttttaaactcaacgagcatttcgttttcacgtctgatgatcggaaggtaatactgatcgggatatttaatcgtctgtgccgcattattgatgagaatatcgagcgtttcaaatttcgactgataaaaatctataaattcctgaattgccttcagatttctgagatcgagaccatacacccaaagtctgtctttccattcttcataatctgcttcctgctgcaaagtttccagtgccaaagccggaaaacgggtcgtcaaaaccaaattgacaccatttctcaagagctttaaagcggttgcgaaacctacctttacacgtcctccggttaaaatgacattccgtcccgttaaatctgccgaaagaaaacgtttttcataattttcatccgcacatttcgggcataatctggtgtaaaaggaatgggcatactgataactctggttacagcagtagcagtttttgggaatctgtaatctggtaagctgggtatcatttttttcatcatcataaaaagcagaaactcccgccaaagcttttttcatcagtaccgattctgaattaatttcaagatcgtgcgttttcatctgagaataactttccagacggttttgttttttggcgttcttatgaattttcgtgatcaacccggaaaaagtttgattgtccggattaagaaatggctcatttttcagggcttttaataccttgagacatgattcccattcgttttgcgtaaagttttggttagaaaaatccattgctttttattttacgcttacaaaattatctgcgtaatgcgcaatgtttttacgtagagataaaaaattttaaatcattaagtttttttaaattctgattatccgtaatatgctataactaaatgttgtatgctgtaatcattatttttttaccacaacgtacactaaggttatccacaaagctcacaactattgtgttccctgtgaaagcctttgttgttattcgaggttaaaattcaagtatgataaataacggatattcaattttaaatagataagttcagttaagattaaatcattctgattttgttgtttgctgtaatcattattttttttaccacaacgtacactaaggttatccacaaagctcacaactattgtattccttgtggaaacctttggtgttcttcgtggttaaaattcaagtatgataaataacggatatttaatgaagtcatttaaacttttttccaaagaaaaaagtttaaatgacttcaattttaaatagacaagttcagttaagattaaaccattttgattttaaggtttatagtaagagacttaatgacatattaaatgattcaaaaacttattgtaaagaattttcgtcattaataaaaaactccagaaagccgatcaaatgttttccgccgtggctccagcggattccgtgaccttctttttccctgacctcaaaaaccagttcgtgtttgtaatgaaagaaaacattccaccatgtggtgtggtcgagaatgtaattgattttctccattactttttgctgtttctgctgattatttccttttacttcgccccagaaatcgtcattcaaccgaccgacgtgtttttcccaggctctctgcgcaatggtaatttcgctgttgaaaggcttttcacaggcttcgatcagtaaactttttaaaggcggaacggcgttttcatcacgaaggcttgccgaagtgaggcgttgtcctaaaatattcagccaatgttcaaaaggaatttcctcaagctgttttgctttaacctcatcaggattttcagattcaaaaatagtaatgaatatattgaaactttcattacggtcgattttaatttcttcattaaaatacggcaaattccaatctaaattctgatttttaaatttcttaatattttcttctaaattttcaagatgttcttcggctagaatggcgtgatatttttctttccattccacagaaaataatgatgtatatttttgaaataattgcatggtttttatttttaaaacacgaataacgctaatgtctttcacaaatatcacaataaattatttatgcgacttatgttctttaaacacgaataacactaatgtttttcacaaatatcacaataaattatttgtgcgacttatgtttttttaaacactaataacactaattttttcgcaaatatcacaataaattatttgtgttttttagtgtttttattcgtgccatttgtgtttacttaaactcgaataacactaattttccgcaaatatcacaataaatatctgtgctttttaatatttttatttgtgcaatttgtgtttatctaaacacgaataacactaatgttttcacagatagcacaataaattatttgtgttttttagtgtttttatttgtgccatttgtgtttagatgtagcctttgtgtttaaatcaaaacattttgataacattagccgataggttttcttcctgaattaaatatccgatgagattgaaccagcttttgcagtgatccagaatccacgcatcagaagtgacgagaatttcggcattttctgctaaaaatttatcgggattaaattccagttcaacgttccagttgaggttattttcaatggcaaaatccataatcatttgtttgattcttccgctgtttgacactggtttgtcgaaaatccagatcagcttttctgcatgagatttatgaaaaaatgaagcaacaaattcaatagcttcctgcgtctgatttactcttttataggttccgaaaacaccggaaagatcgcggaaacagccatctgttccttcaaaaatataagctccggaaagaagactttccagtaaaatcaggacattgaaaccatcgagatatattgttttagctttcaattcagaaattttgagctgtttagattttctgttctgaatctgattttctgaagcggaagctcctcgaactgcctgaatatgtcttgttttaagacggtaatgatttcccaccaattccgacgaagctttttcagcataattccggcttaataaatactgcatatcctgtactgccgatttcattttctcaagctgttttgcggaaccgaataaggtatcgtcgcctgtattttttccccgatttctgttgctcatgcccaaaaatagcacaaaaccgttgaagcggaatagaaatcatgaaaattttaagcataaaatgaggaaaaagatgtgccgatcacattgatttctcttatggacgaacgatgattaattcaaacaaaatcaatcatttaaaaccaattctgagagaacaagtttataagttggtactgccttttataaattccaattcaattgctttcagatctgcataatttgattaaatttacctcaataacgtatttcgttttgaagtacatcatcatcctgaaaaaagtttttatgaataaaaaaagtgccacgatatacgatatttcgaaaaagctaaatgtaagtgtggcaacggtttccagagcattaaacgatcatccgagaataagtgaagcaacgaaggaactggtaagaaaaactgccaaagaaatgaactataagcagaacaatcttgccaaagccttaaaaagcggtgaaacgaagaatgtaggaattatcgttccgtatatcaataccaactttttttcttctgttatacgcggcattgaagaggaactttcgccttttggttatcatgtaattatctgccagagccatgaagatgtaatcattgaaaagaagcatcttaatacgcttcttaatgcgcaggttgacggtattttcatgtcagtttccagaactactgttgatacagagcacatccagaacattttagatacatcaaatacgccgatcatatttttcgaccgtaaaaaggatattccgggaataagtacggttacgattgatgattaccggggtggttatattgctacggaacacctcatcaatgaaggttataaaaacatctgtcatttttcgggagatctgaatcttgagatttaccgcaaccgtcttaatggctataaacaggcactcatcgatcatcatttttctgtaaaagaggaaaatattatttctacaggaagttctattgacgctggaatcgatgctattaaaaagttatgggaaagaaaatctgttcccgatgctattttttcgtccagtgattttgctgctttgggagcctgtcaggaacttaagaaaagaaagattaaaattcctcaggaagttgccgtgatcggtttttccaatgaacctttcacccagtttatggagcttccgatgagttctgtagaccagactccggtaacgatggggaaaatggcaggacaggtttttatcgaaagtgtaaaggaaaacagctttggtgtttccatcgagaaaaaagtggtactggctcctcagcttcatatccgaaagtcttcgaagagaaagtaatttcttatctttttctaaaatattctcgtgttcattttcatcagaaaacatttacaaaatgattttcaatatgatgaaaatgctttatattgcgtaaaaatagcctcatttttaattgaaaaatatgaatgatcctaaaactataatcagccaactcgaaaatactctcaatattaaatttgaaaaagaaaatcccaaagaggaaaacctttgttatatttcagaaagattaagttatttaacgctttcaaatattcatcttgaaaacttctctgttctaaaacctattttcaacactcttcaaacactcatattatcagaatgttctatttcgaatgctaaagatatgcacctgctttatgggctagatcatcttaaaatgaagaaatgttctattttcacggaagatacttttaatcccaatattccaaaagctgaaaccattcccggaaatttctgcaatattagtctggaagatatggatgttccccatcccggatttttcctgcctgtctctaactatctttataatttttcattcacaagatgtacagtgggtaacatttctgaactgaatctttttcccaggctaaacagtctgacgatagaagacacccgtttcaacgaatcagaaaacgacattcaatatcaaagagaaacgaaaggtggattaagatttttaactttcgacagtatgaaattgaagaacttcgatttctttattcctgtatcgaaagaaataaccattttaaaattatacaactgtgaactggacagtttaaaaaatatcagtcagtttcctgatctgaaaaggctttatcttgatcctgatttaaaagttaatgatcccaatcctgattatgataattcacaacagtttacacttaaagaatgcgttattgaatcatttgtacaatattacgatctgactcctgattttatacagccagattttgatgcaaaactactcctttcggctgctccttatctccgaaatctgacagtagaaggatacaaactcaccaatacagattacttgaaacatttaccaaagttagatcaactcacctttgaaaaatgcaccgtagatctggaagattatttagctgtggcagcacaaattaaaaagataaggttccgtatgactgcgataaaaaaccagaatgccttcaggtattttataaaactgaaaaagatagatttttcagtgaatcgttacgaagaacaatattttgtagatatcgaaaagcttttgcctctgaaagaaagtttaaaaaaaatcattcttttggatactgaggtcattcagaacattgaccagataacaaattttactacattagaagagcttgatatcagcgctgattctatagaatttgcacagaaaatactggccatagaatctcttaaaaatctgggactgaatatttatatcaaagaacaggaacaagagattaccgaacccattattttggatttacatcacctgaaaaatgttgaaaaattacagttatataccaatgaagatttttattttagaggaatcggttatttaaaatctttgaaaatgcttattttagaagacgatggtgatttggaaaatttagcgcagttgccttcactcaaaaaactaattattaaggtaaatgagattgataagctccctcgtttagagcaggtaaaagtacttaaactatatagcagaggagaatattgtaaaataaatctacatgataaatttcccaatcttgagaaacttcatctgattgcttgggaagatcaaaaaataaccatcagcaatctggaaaaattaaaaatacttatgttttctgtaagcaacttcaataatgtcattgctttaaacaaccttcctcatcttaaaaaactggatcttagtaactgttcgctttccaccgtatccaaactggaggatttatccaatttaaaaatattaaatcttgaggaaaatcaaattgaaaatatcgacggtttagaaaatcttaagaatctggaacgcctgaacctctatgataacaaaatcgatgatataagtgtattaaataaacttcccagacttcacgaagccaaccttgcaggaaacaggatagaagagaaagacgttgaaaaacaactggacaaaccagagattgcaacttggtattttagaccttttgttcctttttcaatagaaattgattaggaatagagcctggaaaaaataactttaagggtattgttaaattaaaatatatttcataaattagtattatgaaatgttataaatgtcaatcattaacttttctctgatcataatatcatctgaataaattgaactttctagccatttaacaattcctatttgtggtaagtgatctttgatatattggtttatatttctttgaattctatacttttcagatattacaccgtttgtatttgctataacaaataaacttttcttgttttcaaccatatttagactacgttcaatattacttaagtgcagagaaaaatcatgtaatttattttgaaatttttctttgttttcagaatctaaaattatttttcttgtagttttattttcaagtaatttataccaatttaattgtatgcttctttcaattatttgaacattccaaggataatattcaacttcagatattaagtcccaatctatatacttacaatcattatatttaagcataaacacttcaaaatacctaatatcaattaaaatgcttgaatctttaatcaagctgtcttttggtaaattgcttataaatttttcgtaaacaaacttcgttttgtttaaaaaagctttttataaaatatcttttttccatagcaaataggaatcttcaaataaatctaacaatgtttccatatggtctttatattcatttaacacatccgttttctctgcttgtaaataatactcaaatgaacaatagttttcgtaagaaatacaagagtattctgtaatcaatttattctttatttcatttcaattttcggataataatatcggataataataaaagttacttttttcaaattttatattatttgtttctaaaaagaattcaatattactatttaaagattgatcaaaacttaagtatttaatattgatctgaaaaaaactatgtaaaggaatcattctgcttattttatgctaatttataaatatacacagaaaagataaaaaaccagatgtcgcggatttgcaatctatgactttacgctcaatgaaatgttatcaaaatgttaaagcgacttattgtaagtaggaaataagcacggattgcaaatccgcgctatcacaaaaaaaaaatgcttcccacacaaatccgatgtcgcagatttgtaatccgtgactttacgctcaatgcagagctattaaaatattatagttcgttattgtaaatatgaaatcagcacggattgtaaaacccgatgtcgcggatttgcaatccgtgactttacgctctatgaaatgttatcaaaatactaaagttacttattgtaagtaggaaataagcacggattgcaaatccgcgctatcaaaatacaaatccgcgctatcacacaaaaagaaaatgctccctacacaaagcaagaagcattttcaaccctaatatttaatataagtaaatcattacaaagagacccctcgtctccatggaatgaaatcattctgattcagtaagtcggctttcgttttcacttcgccgcttgccactttaatgatgtattcgagcagttcgtctgctgcttccgaaatggttttatctccgctgatgaccgttcctgcattgaaatcgatgatatccgacatttttcccgccagaatagtattggaagaaattttaatcaccggagcaatcggatttcccatcggtgttccgaggcctgtggtgaaaaggacaacggttgctccggaaccaaccaaagctgttgtacattcggcgtcatttccgggggtacaaagcaaattcagtcccggttttgtcgcgtattctgtaaaatcaagaacctcaacaatcggagcagaaccaccctttttagccgctcccgcggatttcatggcatcagtaatcaaaccgtctttgatatttccgggagacggattcatgtcaaaacctgaacctgccgccacaacagatttttcaaaatctttcatgagctgaaggaatttcacaccgtcttcatcattgatgcaacggttcaccaactcctgctctactccgcataattcagggaattcggcaagcatcgttgttccgccaactgccgccataatatctgaaacctcacccaaaactgggtttgcagaaattccggagaaaccgtctgaaccgccacattccaaaccgatattcagctttgtgatgggggcaggttttctttcaatattattagcttgtttaattccttcataagaatctttgatcacgccggtcagcatttcatcaatcgttcccgatttttgctgttcgtaaacaacaatcggtttcttactatcgggagccaaagcatgaagtgcatccataaaaatctgcacctgaagattctgacagcctaagctgagaaccgtagcaccggcaacattcggattattcacatatcctgcaaacagccttcccaatgcttccgcgtcctgacgaattccgccacaaccgccttgatgggtgatgaatcttacatcgatatttttaaatactctggtgtcttctttctcttccactgctgtatcggagatttcgccaccatttaataatgaccttaataaaagctgatgtttactcgacttttcgtgtaacagctctttttcaaaaatatctttcagcgtttcgatatttttgttttcgcagaataccaaaggaaaaaacagccagatgttttccgttcccacctgtccgtcttcacggtggtagcccatgaaagtacggtctttccatcggtccacattcgggggaatccagcctaaagtttcagttttgccttctacttttgcgctttggtgctttacattatcggttgtaatgacttctcctttttcgatgtgttgattcgcttttccgacaatgacaccatacatgatgatctgatctccttcttgaaaatctacggcagcaaatttatgtttagccttaatatcttttgtcaacgtgtattctgcaccgtcaagatgtaccgattctccggcagataaatccagcagcgctacaataacgttgtctttgggatttactttcagtactttcttttgcatgattttttaagaattgaattctacaaaattgttatacgcagtttccatgtcattatgatcgatttcatacaatgcttttgccaccgctgttttcagaccttcaacctgagtaaggtctctatcccagaaagatttttcagaaagtgccaattcagcgactttttcatactcttcgtttgcccagatttctttgaatttagctataattccttcttcatcattcaatggaaggactttttcgccaaaacttccttgataaaatctgatgagacttgccaacgaaaaggtaaggtttaccggcaattttacgttgttttcaacataggtaagtaaacttggcaatactcttactttaaatttagatacaaaatataaagcaatacttgccaaatgatgcttaatgaaaggatttctgaaacggtcgaaaacttcttccgcgaattctttcagttctgcttcatctaaacctaaggtcggattgacttcattaaaaatagcatctttcaggaactttccgataaattggtcatccacagattctttaaccgtttcttttcccgataaaattgccggagccaacattaaagtgtgaccgccattcagaattcttacttttcttaaacggtatggctgaatatcatccaccaccaaaatctgctcgttgattttgttgaacggaattctatcatttaaatttccggcttcctgaatgacaaaaagaaggaatgtttctgaaaccaccatcatctgatcttcataatccaactggtcttcataagattctgcatcgtctttcggatagcccggaacaattctgtccaccagtgtattatggaaataattgttttgatgaatccactccacaaatgcatcttctaaattccagagttgagcatatttgatgataatatctcttaaaacaaatgcattgtcttcaattaattcgcagggaataattcttaatcctttatcagccgctccattgaaatgtttaaatctttcataaagtaaaaccgctactttcgcagggaaatttttgtgcgggccttggtaagaggtttccgtttcgtcaaaagcaattcctgtttccgtggtattggaaaatacaaattccagctcttcttctttcgccaaagctaaaaaatcttcgtaatcagaatatggattaactgatttctgaatggcagaaatgatgtgcttttcatcaacaatttctccttttttaattcctcttgtgaaaagagtatataaattatcctgctcttccattttctgaatagagccgtttggtgttgcctgtaagttgacaataccccctttccagtcggtttctttatttaatttatcaattacataatctgtgaatccacgcatgaaatttccgccgccaaactggacgattttaatgggaagtttttcctgagtattgtttaactcacgatttaatttttgttttatctgattttccatttttctaatattgctacactggctttggtttgttttaaacgcaaagtccgcaaagtttttttgactactgactgtttttaagttcgcaaaggcgtttcactcagcgaaggacttaaagttttacttttaaccattaagatatataaaggtttaaggaaagttaagggaaataaatttcgtaagattgaatttaatttgcttgtaaattcttaattcttcttaacttcttgtctattcttaatggtttaattttttacgatgacttggagttttgaaaacaaagtccgcaaatatttttttaatatctcatgtatatttttaaactcgcaaaggcgtttcactcagctaatatctcaaagtttttatttgaacgtaagagtacttttgccaaacctataaggtttttgaaaccttataggtttagttttatttactaatgactttatatttcggaaccagtattttcattaccgtccaggcaataaggtacgctacggcacagattgaaaaaataatcatgtagcctttatcaattccgtccttaacgattgctccggatttttccaattgttcaaaaaaaccatccggtaatctttcgttgatgtattgaggatatttttccagtaaaggaactccgtctacagttgtccaagctttgtgagcgtgatcgaacaaaactcctgaagatttattaattaaaaaagaaccgattccgcctgccattccgccaattccggtaatggtagcaatggcttttttagggaacatatcgccgaccgtcgagaaaatatttgccgaccaagcctgatgtgcagctccggcaattccgataatcaaaacaggaatccagtacgttgccgaacctaaaggctgtgccaaaagtgccaaaagcggaaaaaatgcgaagatcaacatggctttcattcttcctgaataggcgttcattcctttcttttccacaaaatattttggaagccatcctccgataatggagaataaagtgattatatacaatacaaataacgggaatgcactttgcgtagaatccattttgtaaacggaacttaaatacgccggagtccaaaataaaaagaaccaccaaacaccatccgtcatgaattttccaaaagcaaatgcccaagtctgtctataactgaaacattctttgaatgtgaattttcgttcttctgttgttaccgtattttcctcaacagcagcatcttcctgatcctgattaatatacgtaagctcatactcgttcactttatgatgctgatgtggttttttgtagtaaaatacccaaagtcccatccatacaaatcctaaagctccaatgatgatgaatgcccattcccaacccatcgatttggcaatgaaaggaattgtaacgggtgcagccaaagctccgaccgttgctcctgcattccagatacttgtagaaaaagctctgtcttttttaggaaaatattctgctgtcgttttaatagctgccggaaaatttcccgcttcaccaatcgccaaaacgaaacgtgcaaaaatgaacaaagttacactggtactgatgattgctccggtattagaaaccgttttaatcagttctttagaaccatggaaacctgcaaaccaatctccggtaagaattcccgcagtggcgattccgcagaatgcgtgtaaaactgcacctactgaccaaactccgattgcccagaggaagccttttttggtatccatccagtcgacaaattttcctgcgaaaagcattcctactgcatagaaaatggaaaacagcgcagtgatatttccgtaatcgttattgttccagtgaaattccggagcaatgaaatctttccatgttaatgataaaacctgccgatccagataattaatggtcgtcgcaataaacagcagcgagcatatcgtccatctgaatgcgcttggtttaagtgatttaaccgaactcatacttgtttagaatttagttattttttgttttaatttttaatgatgcgttttttttaacgcagagagcgcaaagattttctttttaaacttcatgtatatttttaagttcgcaaaggtacttcgacaagctcagcataaactattcactcagcgaagctatgtattgcgttatttttcattattactttaaagcttggatgatttccaaaactttttttgtttcattttcaatggttacgtaatcttttgcagccatgagatctttgctgatgagtttacttcccattcctaccgcagaaactccggctttgaaccagctttcaatgctttctttcgtggtatctactccaccggtcggcatgaatttcagattcgggaaaacatccttaatggcactcatgaaccctgctcctaaagcatttccggggaatagttttacaaatgttactcctgccgcttctgcggtgataatttcagtcggcgtcatgcaacccggactgtacaatacgtctttcggaattaaaaatgcggcaacttcagctacaaaacccggactaataaagaaatctgctccaactttgtaatattcttccgcttgttgtaaatttttaatggttccgattcccagaagcatttccggcatctccgcgttgcggatttctatcatttttttaaaattgcttaatgcagattctccgcggcttgtatattctactgcccgaattcctgctttgtaaagcgatttcagtatgtctatggttaccgtttcatcatcattataatacagcggtaaaatcccctgattaacgatggcgttggtaacggtttgaatttttgtcattttgttgaattatcttgtttaaaaataatttttaataagatttagtctatcctttagtctactgtaacttcagcacctctttatttttaacgcaaagggctcgaagattttctttttaaaactcgatgtatatttttaagttcgcaaaggcgtttcacttaaataagatcactaagttttttgatttaattctaaaaagaatcgctgtaaactataaaccagcaactaaaaactattatctcttaattcttcctccggaatttcctgccattacttctagaatgtcttctgcgctgcaatagttaatgtctcctaaaatcgtgtgtttgatcgcacaggctgcgttggcaaaattcagggctttttcgtcgtcgaagttttttaaaccataaattaaacctgctgcgaaagcatctcctgttccgattctatccactacattgtctatttctaaaaattgggtttcaaaataatttccgttgactaaagctcttccctgcgtttgctgagaactcgccgtaacaccaattcttatcttatcgaaaattttatgaatggatggacattgtttttttaattcttcacaagcctgtaaaaaaccttctttatctgatgaaaactgagttcctaagatttcgttgatttcgttcacaccaccaatgaaaatggttgataaagaaaccagttctttcaatacttcgtttccgttttttccgtatttccaaaggttagaacggtaagccggatcggtcgtgatctcaattcccaattcacgagcggtttgtaaaccttctttgagactttcatacgccgattttgaaattccggggctgattcctgtccagtgaaaataatcgcagtcttccaaagcttttttccagtcgattttctctgcttctatgttggcaaatgaaccatttaaacggttataagcaattctgcttgcccgaactgatgatcctacttctaagaaatacaaacctaaaggatgttcatttttagaaataaaattggtgtcaattccgaaacttttgacaaaagataaagctgattctccaacgaaatcgtccgaaactgcacttacatgttttacttcgcaacccatggttgccaatgaagaagcgacattgagttctgttccgccgaagaaaaattccatttcatggctctgcttcatggttctgtttccgggaggggaaagccgcataatgatttcaccgaaagtaagtattttgctagccatattttaataaatactctgtttaatatctgttgttattttaacgcaaagtgcgctaagattttctttttaaaactcgatgtatatttttaagttcgcaaaggcgttctactcagccaagctcacaaaaatttttcaagtttagaaaaaggtggatatgtaattattgtttatttaaaccattaagatttactaaggagttgagaatagttaagttttagcatcgctttaagcaatctgcttaataaaatctaagattttaagcttaaaaaaccttaactccttaattgtcctgaatggtttaaaatattttttatttctcgctgattttacaaatctggcagataattatgttataaaaatccgcgtaatctgcaaggtttttaatttcaaccattaagatgttattaaggagtttagaaaaattaagttgagcttcgctttaagtgcttttgctgaattaaaatctttgattttatcttaatcaaaacttaacttcttaattctccttaatggtttaaattttttttatgtctcccgcagatttagctgatgacgcagatcattttaaatctgcaaaatttactcaatctgcgagaaatttactcttatttaaatttaaaaatcaaaataatttttagcattatggtaacagatatcggaaataattttcccaacgtgttccatatcctgtggcaattcgccgtttttcatttcttccccgaaaagattacaaagcactcttctgaaatattcgtgtctcgggaatgataagaagcttcttgaatcggttaacatccctacaaaacagcttattaatcccatgtttgaaagcgcattcatctgtttgatcattccgtctttctggtctaaaaaccaccatcctgacccgaactgtacttttcctttaatgcttccatcgttgaaatttccgatcatcgttgcgaaaatttcgttgtcggcaggatttaaattgtataaaatggtcttcgttaatttgtcttttccgtctaaagcgtttaataatttagacaaagtttctgcctgcacgaagtcaccgatagaatcccatccagtatcgggaccgagaattctgtgcattctttcgttattgtttctcaaagctcccaaatggaactgctgaacccatccaaatttgtgatacgcttctcctaagaacagtaaaatggctgttttaaactgattcacctgcttttcagcaattacttttcctgaaagtttatcattgaaaatggcacttacttccgcttctgtagcttcttcaaaagaaatattgttcagtccgtgatcgcacagtctgcatccgttttcgtggaaatattcaattctttttaataatgcatcgcacaaagtctggtaagaattgatctcgattcctgccgattcgcctaatttggcaatataatctgcaaagttgtggttttcaattaaaattgctttatcgggacggaacgctgtacttattctcactttccagtcgctttttgccagatcctgatgataattcaaaatatcagtcggatcttctgttgtacaaagagattcgacattcatcatctccagtaaacctcttgttgatttttcgggagtctgcaactgagcgttgatgttatcgtaaatttctgaagcgttgttttcattcagcaattcattaattccgaaatatcttttcagttctaaatgcgtccagtgatacagaggatttctcaaagtatacggaacggttttagcccacgcttcaaatttttctttatctgaggaatctccggtaatgaatttttcgttcacacccatggtacgcattgctctccatttgtaatgatcgccggcaatccagactttagaaatattatcaaaaacagtgttttcggcaatatctttaggagtcaaatgattatgataatcaatgattggctgtttttctgcgtagttgaagtataattcttcagcgtatttattttgtaataaaaaggtatctgtaataaaagagttcattcttaaagttctagtgttattcattagcaggttttccgatggttgctaaaattccgccgtcaacgtagataatctgtccgttgatgaacttacttgcatctgaagctaagaaaatagctgttccagcaaggtcttccgggttgccccatcttccttccggagttctgctgatgataaattcgttgaacggatttccgtccactcttatgggttctgtctgcgacgttgcaaaatatccgggaccgattccgtttacctgaatattatgtttcgcccattctgttgctaaatttttggtgagcattttaagtccgccttttgccgaagcatacgcaacgacgttatcgcgtcccagctcactcatcatcgaacagatgttgatgatttttccggattttctcttgatcatgtatttccccactaatttggacatgataaaaggtccggtaaggtctacatcgattacttttctaaagtcttccacgtccatatcaattgccggaatgcgtttgatgattcctgcattgttgacaaggatgtctatttttccatgagcagcttccattaaagctactttctgagcggcttcccgttcgtcggttacatcgaaaatatatccggttgctttgtatcctttggaatgataatattccagagcttcgtctaattttttcggtgttgtacttgtgatcgccagttcggctcccgctgcggcaagaccttctgccattgccattcccaatccgtgagttccgcctgtaacaacggcaactttaccggataaatcgaataaattcatgtggaaaaattacttgagttcgttagtttttacagcatccatatcgccataatccatgttttctcccgccattccccaaatgaaggtgtaattggatgttccgactcctgaatggatagaccattccggagaaagtacggcttcgttgtttttcataaagatatgacgcgtttcatgaggctgccccagaaaatgacttaccgcctgaccttcttctagatcgaaatagaaataagcttccattcttcgggtatgcgtgtgagaaggcatcgtgttccatacacttccttcgtgcagttccgtcattcccatctgtaattggcaggtttccaatacgctgttcacaatcagtttattgattgttcgtttgtttgcatattttgtttcgcctaattctacaatttccgcttcgctctttgtaattttctttgtaggataagaatgatgagcgggtgcagaattgaaatagaataaggtctgcccttcgtttccgttttcaaaaaccacatcttttgctccttttccgatgtataaagcttctttatttcccagttcgaaaacttcgccgtcaacggtcacctttccggctgctcctacgttgatgattcccagttctcttctgtcaaggaaattttcagctttcaaatcgtctgtcggttccagcttcaatgggcttttcacaggcattgcgcctccgacaatcattctgtcgtacatagaatacactacattgatctgatcttcattgaataagttattcatgagaaattcccttcttaaatcctctgttgtatatttttttacatcttcgggatgatgggcgtaacgaaactcagattttgtcatcttcttttatattcatttttgcggttttgataaaaccggttaaacattgtgtaatcgattgcataaatcacactaaaaaacttgtagaaatactttcgggataaatatataattaatattcaaatgatcaataaaaatttaataaaatattacaaaattctaattttcaatactttaaataataaattaaatctataagttactaaattacgatcaaaaatttaatgattatttaaccaaatgtatacatcaggaattatttaaaattaaatttgaagataaaagttgttagattttaacaatattgattttgtaataataattcaaaatcaatttattctatacatataatgcagataaaaattatcactgaaaaattatattgaaaattcaggctcaaaaaactgataaaaatcagtaaaatatcatattttgtagttcttggtgatgaatttggggaaatttgaagcttgaaaatcgctcatattttaagttttttttaagttattccatcattagaacagaaaaatatgaaacaaaaccaaaagactattaaacgaaataatacactgattaacaattatttaatatttaaaaattaattataaattacagtaattcttttcaaattaatgaaaaaataatatttttttctttgcatattcaaaaataatattagtttaggagcgataatattttgaattgaaaaattacgcaatcgattgcactaaggaaagtgtattttttctgaaaatataaaccacaaaaaacagtagaatacttccaagatccaccaatgaagacaaagattgaaaaaagactttcaaccaaaattaaaactataaggatacaaaatggataaaaaagtacaatcagtaaagtggttatatctaactgtctttctacttcctgtccttgcaatggctcaagaaaaagaaacgaaggaaaaagaaaccaaaatcgacgaagtggttctggtgggatacacaaaagtttctaaaaaagacgttaccaatgctgtttcttctgtaaaagcagaagctataaaagatatgccttctactaatgcagctgaagcaatacagggaagaatggcgggagtacaggtttctctgagtgaaggttcaccgggagccgatgtagatattgtagtaagagggggaaactccattacagggagcaacgctccgctatacattgtagacggcgtacaaatggataatgcgcttactattctttctccgaaggaaatccagtcgatcgaagttttaaaagatgcttcatccacgagtatttacggagcaagaggagccaatggtgttgtccttattacgacgaaaggcggtcgtaagagagcaaaaacatcaattaattacaacggatttttaggggtaagaaaaattcagaatacgatagatgttctggatccttatcaatacgttctctatcagtacgaaatatacaacaaaggcggtgtacagactgatattgatgcattcaaagcgagatacggaacttttgcagatctggaaaagtacaaatctgtaaaaaagagagactggcaggatgaagttttcggaagagaggcattcaattttacgcataatctttccgtgacaggaggatcagacaattcttctttctccttatccttaaataatgtacaggaagacggaattatgatcggttccggattcaaaagaaatatggcaaactttaagtatgattatgatgtttcgaaaaaaatcagcatcacattaaatgccagatacagccgccagatgatctacggagcaggaacttcttccacgggttcgcaaagtaccaacagactgagaaatgctgtgagatatcagccgtttgaaggcggttccaatgtaaatgtagatgagttcgatcctttatttgccaacgaaaccaaccttgtaaaccctatccttttagcgaacagcgaggtaaaggaaaacggaagaaacgacctccttttaaatggaatcatcgaatacagaatcaataaagatttcactttcagaagtgtgatcggatatgtacagagagatgaaatggtaaatcagttttccggacctgttacttctcttgcaagacaaaacaatgatcagcctgttgtttttctgagcaaatcgcaatccagaagaatcacgaataccaatacattaaatttcagaaaaactttcggaaatcataagctggatttactggcaggacaggaaactgtgaaaacagatgcagaatccttaacgatgaacatcaaatggttcccgaaatccatcagcgcagaagaggcatttgccaatattcaggcggcttctcctccatcgggacaggttcaggatattccaaaaacaaacgttttaccggatcgtttggtttcattttttgcaagagccaactatatttttaacaacaaatatatctttactgcttccatgagagcggatggttccagtgtattcggacccggaaaccgatggggatattttccggcggcttcagttgcatggaaagtaaatgaagaaaatttcctgaaagacagtaaagtagtgagcgaattaaaacttcgtgcaggttacggtttatccggaaacaacagaataccggcatttttatacagtacgtttttcacgacatcatcagattacgggtatgcttttgggaacaatgtaacaccgggagctacaacaggagcaattatgtctaatcttaatgtaaagtgggaatccgcagcttctaaaaatatcggggtagattttggattattcaacggaagagtttacggaacggtagatgtttatcagaccgatacaaaaaaccttttattgctggctaaaattcctcagacttcaggatatgaataccaatatcaaaactcgggaagcacttccaataaaggaattgaattttctgtaggcgctgcgatcatcaacaaagaaaactttaactggaaaattgatgcgaatttatcttccaacaaaaatgtgattaaaagtctaggaaacagtgcttccgcaagtgcaaactcctatttatatccttcaggatggcaaaacaacctgaatgatttccttgtacaggtcggaaaaccggtaggaacatattggggatacattacagcaggaagatacgaagtaagcgatttcgactataatcctacgactcaggtttatactttaaaagcaggaattccgagttctgcagcagcagcaaacggagcgaaagctgtacagccgggagatcttaaacttgcagaccttaacggtgacggaattattgataataaagatatgacggatctgggaagcgcacaaccgaagttttacgggggtttcaaccagaccttccgttacaaaaactgggatatgagcctaatgttcaatttctctgtaggaaataaagtatataatgcaaacaaaatagaatattctacacagtatctttaccgggacaacaatatgctggctgaagttgccaaccgatggagatggtttgatgatgcaggaaataaagtgaatgatcctactgctcttgccgccttaaacgccaatacaacaggatttacaccgcctgccggagcttacttccttcattcttatgctattgaagacggttctttcctgagactgaacaacgttacaataggatattctttaggaaaagatttcaccaaacaattgggattatccaatttcagattgtattttacgatgaacaacctgttcacgattacagggtattcaggatatgatcctgaagccaacacgagaagaaatccgttaacaccgggggtagattatgcagcgtatccgcgaagcagatttattttatcaggagttgatatcactttttaaacctaatattatgaagaaaaataaatttttagccattcttttttctgtcatcggaatattttctctgaattctcttaattcctgcgaagaatatttagatgtagaaagcttatccaatacttcagaaaaacagcagtttgattccgcagcagataccttttctgctttagtcggagtctacaacgcaaccatgggagacaacacctacggacaaagaatgaacctgattctttctcaatcaggagacgacatgagaacttcgggagattataacgcaaacgatcgaagaggggtaagctgtttcggcgctattccaacgaatactgagcttttaagaccgtttttagatacgtacgcaggaattgaaagagctaatctggtgattaaaaacattccgctttctcctgtgtatcagacgggttcagcagcggataaaaaattaatggacagatatttgggagaagctttaactttaagagcacacttctatcatgatctgatcaaaaactggggcgacgttccttttcaggatgttccttctgctgatcttccaagcgtatatctgccaaaaacagacagagacgttatttatgataagattctggaagatctcttaaaagcagaaagtttagttccttggagatccgaaggcggaaccaccgctcagagaatttcgaaagcagccgtaaaaggattaagagcaagaattgcactggcaagagccggatattcattaagaagaagcccgcaacagatgatgcagggttccaatcctcagaaatattatcagattgcttatgacgaatgtaaagacatcatcaattccgggcagcatcagttgaatccgagttatgaaggattattcagatcactgcataccaacagcacagatacatccaacgaagtaatttatgccattggagctttcggaggaaattccagaacagacagtaaaataggatattacaacggtttaagacatgatgataccgactggaaatcttccggaggaatcagcgcaattcctgtttatttttatgaatttacaaaatatgacctgagaagagatgtaaatattgccatcttcagggtaaatacttcaaagcaggaagaacttcagacttccatcaactggaacgacggaaaattcagaaaatcgtggacttccatcacaggaacttcacaaaaccttggaatcgactggcctttgctgagatattcagatattctgttaatgtttgccgaagcagataatgagcttaataacggtccttctgcacaggcagttaatgcagttctttcggtaagacagagagcctatgcaggaaatttaagtcaggtaggaactattccgaccgacaaaacaggattctttaattatattgttaaagaaagacaactggaattcggaggtgaaggtctcagaaaatacgatctgatccgctggaatcttttagaaacgaaaatcaacgaaacaagagctaagcttacccagtttatgaacggtacaggagcttatgccaacgttccggaatacatcttctacaaaaaagtagcgtataacaaagacagaacggcacagcaaaacgtttcggatatcgatttctacaccgcaacaggagttgccaaagcagatattttctacagcccgaaccaaagtgttgcaacgccttccggatacacaaaagtaaactggagactggcgatgacgcagccttacatcagtggagatcctgtgaaaagttatgcctattatttccaggctaacagaaaggaattgctgccgattgctttagacgtaatcaactccaattataatcttacgcaggattatgggtattagaaaatagttcacattcatatcagaaaaatacaggcttcatctccaaagtggagtctgtattttaatcaaaaaattttcaatgaaagcttccttttttcttaaaaatttaaattctttttttgcttttctgatcgtattgctcagttttctttcttttaaagccaatgataaaaccatcgtggtttcaaaagacggaaaaggaaatttttccaccattcagcaagccgtcaatgcagcagaaaacggatcttccgtaagaacaagaattgtagtaaaagaaggaatttacaaagaaaaaattaccattccggaaacaaaaggtgctattttgctcgaaggtgaaaatcctgaaaaaaccatcatcacctacgacgattttgcatcaaaaaagaatccggaaggaaaagaatttggaactacaggttcatcaacggtttttatttactcaaatgattttacggcaaaaaatatttcattcgaaaacagttcaggaaaagtaggacaggcagttgctgttttaacgacgggcgaccgaatagcttttgaaaactgcagattcttaggaaatcaggatacgctgtatttaaaaggcgttcaggattcatcagacaaaacaaaaccttccagaaactattttaaaaactgctacatcgaaggaacaaccgactatattttcggagccggaaccgctgtttttgaggagtgcatcatttattccaaagaatcggcaagctacgttaccgcggcttctactccactggaaaatgaattcggatttgtttttattaattcagaaataacaggaaacgcaaaggaaaattcagtctatttaggaagaccgtggagaccatttgccaagaccgtttacctcaattgtgaaatgaattccaccatacaaccggaaggatggcacaactggaacaagcccgatgcagaaaagacaacgttttatgcagaatttaactccaaaggaagcggttcagatcgctccaaaagagtatcatggtcgcatcagctaaccaaaaccgaggcaaaaatatatacaagagaacagattttaaaaggaaaagacaactggaatccgctaataaatcttaagtaaattctaaaaaccacaatttttataatgacggaatgcccgacgaatgggaaattaaaaacagactgaatcctgaagttgccaatgccaacggaaaagatctggataaaaactatgacaatattgaagtttactttaatgatctcgtgaaaaatataaccggacaacaataaaagtaaataaccatgaaaacttttattgaaaacagtgatctaataaaatgtatatgaaattgaatgtatttaaaataatagctgcagcagtattagtgtcctcaaattttcaggctcagaattctgttattcaaaagatcagaagcaatcctaaagctccgttctcttatgcagaacttgcagtgaaagaaggcggaaaatgggatggcgacaaatatatcggaggaactttcaaaaacgttcaggaactcaccattccggaatcgcataccgatcattccacctacatcagatacgaaggcatcggtctggaaaacaacaagatcggataccgcttatatctcgactggagaaatgcaacagatatttttggtaaaaaagtaaacactttggttttaccggaagtcggacaggacggttttgaatcgtatcatcacgacgcagcttggggacaggacattctgaaatccggacgcaccatcggaattggttcctacggaagatacgatgagcagaatgattttgttgaaacatttaaaatcgtaaaaagcaccgccgcgaaagtggtgaatgaaaaagaacagtcttacgcaaccatcgaatacaaaggctggaaaacatggggtgatgccatcgatcttgcttcaaaacttaccattttcaataaagatcgttttgtaaaagtggatttaaatctcagtaattccatttcagggttatgcaccggaattgttgccataaaaaatattccgctgaaacagggaatcagcaaaaataaaaaatgggcttacatcgcaacttacggtaaccagaccgaaacccaaaaagacgacaatctcggaatggcagtcttctactctcttgaaagctttgataaatatataaagacaaaatctacgcataccgttgttttcaagaagacaaaaaacgtttcctattactttttaggagcatggtctctggaaccgaacggtttaaaaacagaagaagctttctatcaggatttagatcaaaaactggaaattttagataaaaataatcaactttaacgtttacaatcatgaatttcattaatcagcatatcaaactattcacactggtcgctttaagttcaggaatcttttcagcctgtgcgcagacaaaagctccggttaacacttcaattcagaagcaatcttcaaattccggaaaaatagttcccctcaatctgaaatggtccgaaagaatgatgctgtccgaaatgcaccgttttcctgaagcatggatgcttgatttcagcaaaaccccaaaatggacgtatcctactgccattgttctggatggtgcagaaaaactgtatgccaaaacaggtaaaaaagaatattacaactacatcagcgaatttggcgaaaagctcattcaggaagacggaaccatcattacctatgagcttgataagtataatatcgatatgttgaacagcggaaacgttctcctctatctttacgaaaaagaaaaaaaagaaaaatacctgaaagcacttcaaactcttcgtctccagatagacggacagccaagaacgaaagaaggttctttctggcacaaaaagatttatccttatcaggtatggctggatggtttatacatgggaatgcctttctacacgcattatacaaaggattttatgaaaggagccgatgcggcaaaagcatatgacgacatccttttacagttcgattctgttcaggagcatcttctggataaaaaaacaggtcttctgtatcacgcctgggacgaaagcaaaaaagaagcttgggcagacaaagaaaccggactatcgcagaatttctggggaagagcaatgggatggtacggaatggcaatggtagatgttctggattatctgccaaaagatcatcccggaagacccaaattaatttcttacatcaaatcctacaccgatgccatcatcaaagttcaggataaaaacaacggactgtggtatcaggttttgaataaagcaggagaaaaaggaaattacaccgaagcaactgcctcatccatgtttgtttacaccatcatcaaatctgtaaacaacggttatttgccgaaatcctataaaacgtatgctaaaaaaggctacgacggaatcattaaaaatttaatcactgttgctgaaaacggagtggtgaatttaaataaatgctgtgcagttgcgggtttgggcggaaaaccttatcgcgacggttcttacgaatattacattaatgaagaaatccgttccaatgatgccaaaggaacagggcctttcattctggcaagtctggagtttgaaaaataatacttaaaaccattaagatgaggttaagaagaattttaaagtatagctaatcctaactacactaaactcctcaataaatcttaatggttaaaaaatgttcttatataatttcaacaactattttgctgagtgaatagtttatgctgagtttgttgaagtacttttgcgatcgaaaaatatgaagtaagccattaaaaaaaatctttccgctcatggcgttaaaatttaaaccagattaaaaatctgatttatgaaaacaaaaaacattttaaatatactttcaatagccattttttccattgcatcaaattatttgagcgcacaggaaaaaaactacgtttccgaagtatggactgccgatcaaggaaaaaactacagaaaccctattctttacgcagactattccgatccggacgtgattcgtgtgggagatgattattacatgacggcttcaagcttcaatgaaactcccggtttgccgattcttcattcaaaagatatggtgaactggaaactggtgaattatgccattcaggatattcttccgaaagagcatttttcaaccccgaaaagaggcgacggagtctgggcgccgagtatgagatttcacaacggcgaattttatatttattggggcgatcccgatttcggaatctatatggtgaaaaccaaagatcctctgagaaaatgggacgatccagtcttagtaatgcaaggaaaaggactgatagattcctgtccgttctgggatgaagacggaaatgcctatcttgttcatggctgggcgggaagccgtgccggagtaaaaagtattttaacattaaataaaatgaatccggaaggaacaaaagtgctggataaaggcgttcacatttttgacggtcacgatgctcatcccaccgttgaaggtcccaaaatgtataaaagaaatggctattactatatttttgctccggcaggcggcgttgccacaggttggcaattggtcttgagatcaaaaaatatatatggaccttacgaagaaaaaattgtactggaacagggctccacaaagataaacgggccgcatcagggagcgtgggtagataccccttccggagaagactggttttatcactttcaggatgtggatgcgggaggaagaattatacatctgcaacctgtaaagtgggaaaaagactggccttttataggaacagattataacaaaaacggaatcggcgaacctgttttaacgtataaaaaaccaaacgtaagacaatcctatcctatcgttaccccgcccgaaactgatgaatttgatggtgaaaaattaggactacaatggcagtggagtgcaaatgaaaatatcgtatggtcttccaaacttcccggacagaagtttttaagattattctccatgaaagttcccgaaagtgaaaacaacctttggaatgtaccgaatctgttaactcagaaatttccggctcccaattttgcagcttccacaaaagttaaattaacgcccgaagaagccgaagaaggaaaaactgcaggacttttggtgatgggactggatcatcagtccatcgtgattaccaataaaccaaatggattttatatacagttaagaagagccgaaaaagcagataaaggcggcgaagaaaagattttatttgaaacaaaattaaaaagcaacgaagtctatctgaaagtaaatgtaaacgaaccgaatggtttatgccagttcagctacagcgaaaacggaaaaaatttcatcaaaacaggcgacgtttttcaggcaaaacccggaaaatggatcggagctaaagttgggctgtacagcatcagtacatcaaaagcacctcgaggcggatatgccgattttgactggttcagaatcaccaagaattaatttttatttgattaaaaaaatctgcgccatctgcaagatgtgcgagtgaaaaaataacaatcagatccttcactacatttcatttcgttcagaatgacagtgtagataaaaatttagttaaaatcatgaacagaaaaatgtataatatagtttcatttttaatcgtcgttttgctgttgtcgggatgtaaatctcagaacactacagcagcaaaacacgttaaaaagattacccatatttatctcatcggagattctaccgtggcagattacaccggaaactacgaacccggaaaagattatatgaaagtaagatatcccattacaggatggggacaggtttttcagccgttttttgcgaaagacagtttggcttctttaaaacctgccatttcagcggactctgtggagattatcgacaaagcgcatggtggaagaagcacgcgtacgttttttcaggaaggaagatggagagaggtgtacgaacatttgcagacgggtgattatgtcatcatccagtttggacataacgacagttctgaaaaacatccggaacggtacgtaaacattcagggatacaaagaatttttaagattatttgtaacgcagacgaagcagaaaggagcaaatcctgttattttaactcccgttgccagaaattacccatggaaagacggaaaactggaaaatgtacacggagaatacagcaaagcgcccattgaaattgctaaagaaatgaacgttccgtatattgatctgaatacattatctatggaatattttaccggaaaaggacaggattttaccacaaatcattactttatgaatcttccggaaaatgtatacgaagcctatcccaaaggtcagaaagacaacactcattttcagcccgaaggagcaaaagtagtagcatccattgtttatcaggaatttaaaaaaataattaaaactcaaaaataataaaatgaagaagacttgtaaagtgatcggtttagcagcagcaatgctattttcagggcaaatctatgctcagaattctgatatttataaaaatattgagtttaaaatgccgcaggttgcagaaacttcttttgcagccaacaccgtttccattacacaatacggcggaattgcgggcggaaatgtaaaaaatacagaagcttttaaaaaagcaatcgaagatctgagcaaaaaaggaggcggaaaattagtcgttccccgcggaatgtggcttaccggccccatcgtcttgaaaagcaacattaatcttcacattgaggaaggagcgatgattattttcagtaaagataaaaatgattatccgttggtagatgtaagtttcgaaggattgaatacaacgcgttgccagtctccaatttcggcaaaaaatgcaacaaatattgccattacaggaaaaggaataatcgacggaagcggtgatgcatggagagccatcaaaaaaagcaaagtgtctgaatctgaatggaaagaaattgtaaaatccggcggaattgtatcttcggacggcaaaaactggtatccttcggaaagctataaaaaaggattggaaagcagctccaacttcaacgttcccgacaagatttccaaagaagaactgattacggtaaaagattttcttcgaccggtaatggtaagtctggtggaatgcgacaaagttttgctggacggaccaacattccagaattctccggcatggaatcttcatcctttgatgtgttccaatgtcattttaaggaatcttaccatccgaaacccatggttttctcaaaatggagacggtctggatctggaatcctgcaaaaatgttctgatctacgacaatacgtttgatgtgggagacgatgccatctgtataaaatccggaaaggataaagacggaagaaaaagaggaatgcctactgaaaatgttatcattaaaaacaatattgtgtaccacggtcacggaggtttcgtcatcggcagtgaaatgtcgggcggagcgagaaatatccacgtttcagactgtactttcatcggaacagatatcgggctccgcttcaaaaccacgcgcggaagaggaggaattgtggaaaatatttacatgaaaaatattgatatgattaatattccgactcaggtgatcggcttcaatatgttctacgaaggtgcatctccggttctggaagacgggcagaaacaggaaggcaacaaagttccggaaaaagtatatcccgtaacggaagaaacgccggttttcagaaatattttctttaaaaacattacagcgaccaattccgatgaagcgattactttattcggtttagctgaaatgaatcttaaaaatattgtgattgaagattctcagtttgataccagaaaagctttaaccatagtagatgcagacggaattcagttaaaaaatgtaaagctgaaatattccgaaggaacgggagcaacgatctataacagtaaaaacatcaatctttcaaccgtaaagtttgattcggcaaataaacctgttgtaaaagtgttaggaaataaaacaggtgcagtcttattaccgaaagaaattatgtctgataaaaacgcactttctatcggaacggatgtatcgaaaaatgcagttaaatagtgtatcaataatttaaaccattaagatcaattaagcttttaagacaggtaagatcactttattttaagataaaatcatactgattttcttaataaaacttaacgtcttcaatctccttaatggtttaaaatttaaaatttgaccacatgatgtttaaccgaaaacatacttatatttctattttttttgtggggacaatggcattcggacaggtaaatcgaccgaatgctactccctataccaacgaaggaacattcgaaaaattcaaaaaaaaatatccgtttgtaactccgattgaccgtccggttcctcaaaatatcgggattgataaagacgcagaatataaaaacatcaacggaatttctctgaaagcagatgtgtattatcctttagatcagaacaaaaaacatcccggaattgcgatggttcatggtggcggatggatttcaggaagtaaggaaaacgaaaaattcatggctatggaactcgcttcaaaaggttatgtggtgattgccatcggttatcgtctcgctgatgttgcgaaatttcctgccggagtggaagacatcgaaaccggaattcaatggctgaagaaaaaccacaaaaaatattctttagaccgaaagaaaatagcggttctgggagaatctgccggagcgcagatcgccactttagtcggtgtaaaatcaaaaaataaaattcaggcaattgtaaatgtagacggcattgtttcttttattcatcccgaagcggaagaaagcacttacgcctcatattggctgaacggagacagagaaagcaatttaaaaaactggacagccgcttctccgttggaatttgtggataaaaatacccctcctactcttttcatcaacagttcgcagccaagatttcatgccggaagagacgatatgatgaaaaaactgaagagttataacattccgacagagtttcatgagattaaagacacaccgcattctttttggtcggcagaaccatggtttacggaaacgctgaatctgactgttgagtttttaaataaagttttgaaataattttaacgcaaagaaactaatttaattaaaaaaatattttagtgagccaagacgaatcaacaagttgatttaatgaagctattcttatggcttcgcgaagcaaatttatttgcctttgctatctaaaaataaggtaatataaacaaatctttgcgtcagaaaataataaatcagtttatgaaaaaattatttttaatctttctcatttcgatggcaaatttgctgtttgccggaaatgatccgtatatcaaaattaccgttgcaaaagacggaagcggagatttcacctcaattcagaaagctattaattccatcagagatttaggatcggaagaagctttgatcttgataaaatccggaacgtatcatgaaaaagtggttattccttcttcaaaacataaaattacgctggaaggggaaaataaagacaacacgataattaccaacgatgatttttcaggaaaaccggattctttcaatgaaaagatgaccacgtttaattcttatacgttattggtgatgggagatgacataaaaatcagcaatataacgattcagaatacttcctgtaatgaaggacaggcggtttcccttcatgtggaaggtgaccgttttatcattaaaaattcaattatttcaggttgtcaggacaccgtttatgccgcaaccaatcacagcagacaatattttgaaaactgtttaatcgaaggaacgactgattttattttcggacaggcaaccgttgtttttaagaactgtacgattaaaagtttagccgattcgttcatcacggcagccgcaacggaagcagacagaaagtatggtttcgtgtttttcgactgtacattaactgcgaaagaagacattaccaaagtgtatttaggcagaccttggagaccttatgcaaaaacggttttcatcaatactgaaatgggaaaacatattcttcccgaaggctggaatccgtggaaaggcgacaaaatgtttcctgataaagaaaaaacagcctattacgcggaattcgggagtaaagtagaaggcggaaatacttcgaagcgcgtaaactggtctcatcagctcacaaaaaaagatctgaaaaactataccatagaaaagatttttgatggctggaatcctcaacataagtaatgagtaattaataatgagtaatgattacaattcgctaaatcgacataggaaaatggagcgttaagaaaattaattctgtgaacgttaagaaaattctattgtttgagcgcgactaaaatactgaataaaaagacaaacatcaaattcgcgcgagttctaggatttttagtgaatagaaataatttttagcggaagtttccaggtcttgaacttttgattcttttgtttccaagacaaaagaatataaattaaaaaatttatttaaaatgaaaaaaatacttttaatctttagcatagccgtttcaactttaattatggctcagcaaaagccaatccttttcttaattggagattctaccatggctaataaagaaaatccggacaaaaatccggaacacggatggggacaggttctgcctcagtttttaaccaacggaattgaaattcagaatcatgcggtgaatggaagaagctccaaaagtttcagaacggaaggacgatgggataaggtggaaaaacaactgaaaaaaggagatttcgtcattatacagtttggtcataacgatcagaaaatcaaagattctacaaagtttaccaatccttacacacagtacagagcgaatcttgaacgatatgtgaatgaagccagagcgaaaggggcaactcctgttctcatgacttccattgtaagaagaaacttcaacgaaaacggagtgttgatcgatacacataaggaatatcctctggttgtaagaatggtcgccaatgatctgaaagttccttttgtggatatgcagttgttaacagaacagatggaaattgcttacggccccgaaaattcaaaaaaacttcatctgtattacaaagaaggcgaagatccgtattatcctaaaggaaaagaagatgacacgcatttatcgaaattgggagcggaaacggtggctaaattagccgcgaaaaatttaaaggctttgaaaatagggttggaaaaatatattaaatgatagagtttccgctaattatgcagataaaattattttaaagatctgttcaatcagtaaaatttgcgcgagaataacataaaatcaatcaatacataagatttctccttcgtcgaaatgacaggtttgatgtaataatagtttatctgaatatccgttaaataacctatcactaagcactgatatgaaaatcaattacttataacaggcacttcgacaagctcagtgtgacacctctaatactaaacgcttgatttctagcgatgtcaagctgagcctgtcgaagctttaggttaataaacggacaataaaaatagtttaataaaaattgaaaaagtaataagatgaaattcaaaaaagaggctttcttcgatgggaattctgaatgggaagatttgggagacggcgtttccagacaattcgtcggatataattcccaggtcatgatggtaattgttcaatttgaaaaggatgctgtaggagctttgcatcaacattttcattctcagatcacctatgttgcggaaggaaaatttgaagtcacagttgatggtgaaatgaaaattttacagaaaggcgacggattttttgcccagcccaatatttttcacggcgtgaaatgtctcgaagcaggaaaattgattgattcgtttgctcctttcagagaagatttcatcaaagataagttttaaggctccattttatttttaaaatcccattttcaaaaacaacataaccaactgtttatcagttaaataaaacatataccaaacagctaatattttttcccgaagattttccggttcaggagatttaaatttcttacaccggatcatctttgggatttttaatttataattcagcatcaaatacattttaaacattaaataaaatgcaaccgattaaccaaataaaataaataacattataattatataaatatagatatgttaaaatataaattatttgtttagcgtatttgtaattttacaatctaatcataattaaaaccatacttactatgaaaaaaacatttaaagctgcttttgcgacagtagctctctgttctgtttttgccttcatcggatgcggacaggaagacattaaatcagatctatctgaaaacaacagtgaccttaatataagaagtgcactggcttctaaagccgtagttccgttagcaaattgtactgcaccgggatgggcttcacaaaacggaggaactacaggaggcggaacagctgctgaaactactgttactacttacgcacagctaaaatctgctattgaaaatacttctgtaaaagtgattaaagtaaccggaacgattaccgtttcagcacgcctttcactacaggatcagacagggaaaacaatttacggaacaagcggcgcgaaactggtttctacagatcagacgaaagacggttccggaattcttaatgttaaaagatgcaataatatcgtcatccgaaacctgatttttgaaggtcccggagcatacgatacagacggttgggacaatgctattctggacgactgccgaaatgtatggatcgatcattgcgaattcagagacggtgtagacggaaattttgatattaaaaataaatctgactttgtaacggtatcctacacgaaatttcattatctgaaacctccgaaagcaggaggatcgggaggaacagacgatcacagattctccaacctgatcggttccagcgatggcgcaacagcagatgcaggaaagctgaatgtaacttttgttcgttgctggtgggctccgggatgcagagagcgtatgccgagagttcgttacggaaaaatccatatcctaaacagctattttaacagctctgtaagcaacaaatgtattgcagcaggagttcaggctaatatccgtgtggacggaaatgtttttgaaaatgtaaacgagccgattaacttaatgagcggttacacaggagtaacggttacttctaacaatactttcaccaacgttaccggtaataagcagggaggcggttcaacagctttcacgccaccttacacaatttctacgctttctctttcatcagtaaaatctgatgttacggcaaatgcaggagcaacgttatccggaaatatctgtaatactttttaatactattcatataaatgagcggctgtcccgatcgggacagccgcttttttctgcagaacacggaataaaattgatctaacgttccatgtaccgccactaactataaatcagaaatactgtttttttcaagccacttcggatattcttttccaagcagtttttcggcataatctccgtaccagctatagccgtttcttctttcttcggaaacttcgtaataattgtattttacgcttccgtcgcgatctccgaaaagaggtttattattgttgatatcataaaatcttgcccagatcacagaatttttatcttcggctaaagttcgtaccgcctttccgtttacttttgccacttcatagctgtagccttcaattttattttgcctgaaccattttatggcagattttacggatttttcgatttccggagttaccggctgcatcattaaaaaccgtacaattcccacagattctgcggtagctaaagagacaggttcaaaagctcttgctttatccggctgtaacgtttcttcgttgtactgatcgccccagatcgcaggaatatttttttgcagtacctgcgtttttaaaatacattctattcctttatgaacggcggtttttgatttttctttcagctttgcatccatcacatcgaaaccattttttccttcggaaacattatataaaaccgttaatgcattaatcattgcattgtcgttatacgtaatctgctttctgtacagtcctttgttgggataatactgtggaaaacctccattgtttttatactgcatcagcaaaagataattgattcctttttctgccgattttaaatattcgggatttttggtagcagcatatgctttgatgagcgcattaatctctcttgaggtcgcattattgtcaatggttgcatgatcgtctcctgttgcttttatctttcttaaaagttctttgctgagaggaagattgtagttcacgacagatttatcttcgagctgttttccccaacctccgatcggaagctgatagatcattattttttcagctaaggtgtcttttgtctgagcggaaaaattgacggtagctaaacctaaagtcagtaaatagagttttgttttcatccttatgatgtttatttaatggttacctgtaaagggtttgcgatgatctgcgcctgttttttcaacagatcttcccaatccttctgtgtattaatctgtccgcttttctgccatgcaaatcctgcgtagtaggtaagctttctctgaggttttgtgatgaccagtaaattgctctgatccggagtttcggacttaaaagctattgatttttcaatagtttcaggatttaccacaattccctctccaacaaaggcgtcatcaattttttcccaatgaagataatacccttctttgtcattaagctttgcttctccttcgtttttgtgaagggtaattccgatggtataattcggaacctttttttccgcttcgaaagtggattcgaattttgaaaagtttgaacctaaatctaaagaaattattttggtttctttcacgccaaaatcgctccagggattgtatgtaagctcaaaaactgttcttaaaggtccttcagtaatggttttagaggtaacaaaattctgcgaaacctgtagttttccgtctttccagattccgattcctcctgttcctcggctgtctccaacgtgatagggatcgtagccttctcctctggaatctctgtggtaatacatcggatcggttaaatagcctttataccatttattgataaccggctgttctgttcttttcagccagatatccactccgctggaaagggtacttccttttactccggctaaagcttctttctgccctttcggaccgtacattctgaatgcaattttttcattttcccatgcataatcgtctactctttccggaaccagtctggaataggtggttactttactttcaggaaccggagattttccatcggctgtaatggtatatttttcagaggattttccgtcaatatgagccatgaaaagcaattcatcattgtttccgtctccatcgttgtcgatccactgaatggttattaattgtcctttgctgttttttatccttatctcttcttctttatttttatttaaaaaagatcttagctttgaaacgggaactgcaaccacttcatttctttcaaaattcagattatttttcacctgaacagaagtctgggcattgcacaaagatgaaccaatgcaaccgattgcacaaatgaatccaagaattgattttttaaccgtaaacatattctgtactgttgagttaattttccaaaagtaaaaataatttttggtcatgaagaggaatttttaatgatttaacaaaaaattgtgacttttagtttcagattctgactggtttatgaaagtagccgatttttaaatttttaattttaaagttaaataaaaaagcgtccgcatttctgcagacgctccaaactcaatcttcttcatcatacatcgaccactactttaacttctccacataccattttattgtgctttaccctctttttttctaaaaattccgcagactgacagtttattcttctatccaattaattgattaaaatctcagatcattcgttttataaggcttaattaaatatacagatctgcttcgcctgcggaaaaaacctgaacaaattcttaaaaaccacaatcacctgaatttgtacagttcctaattaaaattcaaactcaccaatcagaattccgtcatcattccctctttcattttctttctgattctgaaacactactgtttttctttcctgcttccctgttgcataattaatataaacttctgccataatcgcggttggtccggcaattcccacctgtctttctccaaagaaattggtctggattttatattttcctttaattgcttttttcagcagaaattgttccggtccgaaacctctcgtaaaatcattgctcagtctccctccaatttctgtttccggatgactgtagtaacaacgttcgttattgggatcagtaacccagagatcgatatcggtatcgtctttattccagttgatcactactctgatatttaccggaagatctgcaataatcttaggattgatgttcttaagatccagtctgcttccgtacttgctgatcagttcattgatctccatgatcactatttcctctattccatcgtctcggtctgctaattcccttgtataagactgggtgagaacgttatataaattttccagagcctgctgatattttccgttatcttccaatgccaaagcataatctctgtaactttgcggatcaaacggtctccatttcaataccttctgagagacaaaaagttctttatcataaacttcagcctgctttaatttataggctaaaagcttgtacaattcttcattttcaatatcaagatctgcaatagaactcaatactttaagtccgtattttttatcattatttttaaacagcaactgagcaacatcaaaataatactgaggtaggttttcatattgcgctctgtttttcagataaacttcatatattttttcagggtttttagcagaattaaaaaacttcatataatctgcattggattccacctcaattaaattcactcttcctgaattcattacctcggaaatcccctgcgttttcattgaatctgcttttgcagtccatcctgaattaacactcattcctgaaactcgcccttcaagcgactgaactgaattatttgaagcaatagaagcagttcctcttacattgatctgttgattttttactggttcagatgttatcaccgtcgatgaggaaaccattgcatcttgtctttttttaactcccaacgctccggttatcaccacctcctgaatatcattagatctacgattagaaacaggtacttctaatcgatcaacttgcacaggtgaagcatccactttcggagcaacattcgcagttggcggcggagcataaacagattctttcactcctccctgattagttattccggtaactaccacctcctcaatcctttgggttctgctatcagaatcgattagttcatcataatcaggttccggatatcgttttaattccttctttttcttatattctgttttccaccagtccttcaggttttgtgtcattctttccgcatcatccatcagatctttcacgcgctcatcttttgcagccctgttgtttttaaccatctcatcaaaccgggcttttaattctacaggcggagcgatatcataacggacgtaatcttccacattttccaaaaccatcaggctcatattattacttaccaaactgaactgtttgctgatatttttaatctcctctttattttctttttcaaagatttcaagttcattcagtttcttctgtgcccagaattttgaaatttcccagtcttttaccgcgtgttcatttatatttaaattaatgacttttgtttcggttacttcatttccatatccgaattttgccttaactgttgtttggttttcttttaaaatacctgtcagcaaaaaatcctcagaaatggtctgcgttagagaaggatagacttcagaaagctgagcattattttcaattcctaaaaattttaaaggctgaaataataaacttcgaaccacctttttaggatcattttcgttcaggtttaaaaattctccgcctgttttgctgctgatgaatttcaactgattaaaatgggcagcattggatgaggaaatggtataaaccggctttgtccagatcattttcagttctccgaaagacgacaatccgtctgtaaagaaaaagatttcatcttcacgaagcgactccagttttccgaaatctgttccgccatcgtacgttgtttttaacagataagcttttaactgattccagtttccgtcattaattctgaaagtctgtccttcttcgaatgtattattaatgaaatatatctttacattcaggtttttattggtcttaaaatattcttccagtaaagccagttcttttgaatgatcgcgtttctttccgcttaaagaattatcccagacaattgccagtttattgggaagccttttggctctttcgtttgagctaaccgccatatttgcaagaaaataagacgaattaccagaagctttctgtattaaaacactttggttttcataatcctgaggaaaattaatctttaaattatttccgagcttatattgtgttttgtgcgtttcggcaacccaagtatttccgtttttaacgaaatgaaaacttccgtccggtttttcttcgagctgtggggaattcaaactctgaaaaacggttgttttaacattaaattcaggaatctctgagctgtaattcaacggtaaaaaatactggtaagagttccctgcttttttcagttcataatgataggtaatctgaacagttctttcgccaccatttgcagcgatcggataaactgttgtacgaaagctgtttccttctactttttcaaggattcccggatcaatatttctttttttaatcgtttcgtaaacttcttttgctttttctttttcaacaggaacagcatttcttagtttaccatttatgtctaaagcataaccgcttgcattaactccttcgggaagcggaaaggtaactctcccttctcttaacctatctgagttatttttaaaaaccatcgtcacgatattggtagaaattcttcctgtgattttggtttcaatattcagtttctgaaggacaacctgattgctcttttcataacctccctttccattacccgtttcaatcgtcggaatctgagcaaaacaaaataccggaaaaaacagcagcacttttatatataaatttttcatggataatctcatttaatcttaacatctgtttctatttatatagatgcagaaaagaggaaaagcgttggaaaagtttttgtaaaaagtattaaattttgtaaaataaattgtaaatcattgattataagatcaataaaatttaaataattattacaagaaagtaacctctgaatgatattcagaagataatttaataattgacagaatttaggtaagcagatttttagaaatctattcaaaattattcagaaaatcaaacagatcatcttccggtttcagcccgagtttttttctcagtctggatcggcttacattgatactggaaggcaatacctgaaaaatatctgccatttctttagaatttaaaccaattttaaggtatgcgcacaaacgaagatcgtagatggaaagattgggaaatttcttcctcattgccttaaagaattcctgatgcagctcatccatctggatttcgaaggtgtgatcgtctgtttccagataggttttcagggttctgcggatttctccgagtcttattttagaaatattcgggttgttttctatttcaagtattttttcattaatggtagaaagaagacggtttttatcttcatcttctttggctttggtggcaagttctatggttttgtttttgatctcttctttgaggttatttttctcattttcaagctgtcgctgtttttcaaaaaacatttcctgtctgtgcttttctgcctgttcgcgaagtgcattctgctcttttttcagaagttcaagtttttgttttttcagtttattttcctgatatttcttaagagaataaaaaaatcctgctataataagaagataagctgcataactataaaggcttctgtaccaaggcggattgattctaaacgtaaatgtttttatgtcagatatctggtttccgattttagcttttaccaaaaaactgtatgttccttctttgagaccaagaaactctattttattttcagaattccagacagaccaatcttttgaaaatccgtccagaaagtactgatattctactccaccttcattgggaagcgaaaatacaaaacgtagattattgaaccggtaaggaagcttttggttttcttccagatcaaaatttcccatattgttaaacatctgcgccttcgtgaaaataagccgggaactgaacctgttcttatcctgaaaattcagtttttccagcgcaaaaccgttgtatatagggaaaaagttatattctgcagataatttttggggaatataaaatccgggaagtttaccgttaataaccggaagctgtactttttcggaagcaggaaaaaatttattgttctgatgattgaaatcatactgttctgatgaagtgaatatttttattttctccttgattttgtaaagatgcggcaaatttcctttaaaattactatcgggaaaaatctgacggttaaccgcgttaaaactggcatcaatggttgtccgcaagatcccgtaattaggaatattgatccagattgtatgatcattttccacttcaatctgacttaccgctcctacaattaaattcatttttttaatgaatttgagtatattgttttcttttttgtaaacgaaaattccagaatagtttcctgttaaaacataatttttcctgaaaggggtaattgcagaaacgccatattcattattaactttttttaaactgtttttctccagaataaaaagtcctttatcgtgaccgcaatacagatttccgtcaatatttttaagcgtccaaacctgtccttccgatccttcaatcatctgtaaaaaagtaccggaacgcggatttcccatttcattccagtctgtaaaatacaatccctgattagaacctaaaaagaaagtatcgtctttaaaagctgctgtgtaacccgtcccgaaatcatcatcctgactgtagaaatacgtaatatcatttttaatatctaccgaagaaattccataatccagacctaaccaaagttttccgtttttctggtaatgcatacacaaaaccgtattattcggcagccctttgcttttgttgatgtgctgaatgattttaccattcagatccgtaatgtatattccgtccagtatagttccgaaagcgtaatactgtttccccaaagtaatgaaactgaaaactttgtttttgataagcattgaagacacttcaagctgaagcggggtaagtcttccgttattccattcaaaaattcctttatctttagtaatgatgcgtagagaatttccgttaaaaaaaacaccgcttacatccaaagagctgttatctggataaggaaacaggagtttcagctttactccgtcatactcaaaaagtccttttttttcatcggcaagaaacaatcttccgttgacgaagaaactattggaaaatctggattttgcggaaaatttggtgagttttttttccgaacgtatatagatgttttgatgagatacaaaaaccatctgatttttaatctgatatgttccccaaaattcttcatttactcctcctattttctttctgaaaggatacagtgaagtaaagctgaattttctgaatttatttttcttccagactccgaaatccatatctgctcctgcataaatggtagaatcatcggcaacgtataaagatcttgtatagccacggtaactcttaaaatgtccccatgttttaccgtcaaactccagaagtccgtcttcggaagccatatagatcatgccgttttttgcagatttaatatcccagattttaccgtgatttccgtagctctcgggcagataattttgcacaaagggcatccctttttccaaaatgctctgtgcattagaaaaaaaactcaggaacaataaaaagtaaacaaaaaagtgtttcagcattctactcaaatatagataaaatttaagaaaaaaacgtccgtttttttcaacggacgtctaattatttattgttaattttaattatttcacaataacttttgaagactgaacttcccctttatctgtcgtggtttttaaaatatacattcctttggcaaatccttgtgtggatatggcattagagttctcactctttaccttttgcccagccagattatatacttcgatcgtctttactttactttctgccgtaattgtttcacctacattcgcaggattaggataaattctcaagcttttggaaacggcagcttcattggttcccaatacggtagctttatggaaatacaaattatcaaaataaaccgttccgatattggaagtaatcacaaactgggcgatatcatttcttgcagcattattcgtccagctacttagcggaacatcaattgaaagccattgtccttttaccaaagcaggtgtagttcctgtattaagcggaagctccagtgcagaaacctctcccgaagttcctccccattgtgaaagtttaagattgaatacttttcctaccagatccacattattgtctatccagatatccatatggaaatgggtaaaattagttgcattgatatgatgtccggctccgctgaaatccactcccaggaaattggtgaaaataatttttttagtatcatttcctgctacctgaatatcagaaatactagaatcgtcccaaaccgcagaccatgcatcaatcggaatattggcataagcattactgaacatggaaatcacatccgtcgctgctctcgcaggaggagttggcgcagcaacattaggtcctgaaaccacataatttaccgtgtatgttttggttaccaatccgttttgtgaggttaccagaacagttgccgtacccggaattgccgatgcctgagtaatgacttttgttgcacttgcattggtggttgtagccgcagtaatttgcggaacagccgttgtaccttgcggatattccaaagtataggaaagaatcgcagaactgaaccctgaaacagtggttccgtttacttttaaatcgcttaaagtagcatctgcagcaggattcacaggatttttccagaaatagatattatccaggtaaattgtcgaaggatttgctccggactgtccgtcaaattttatctgaaaaacagaattccaggtcattcccgtaaatacagattttggaagatctacactgctccatcccgcattcgtgagaggaacattcaccaaaaattcactggatcctgttccgttattgataggtgaaactttaagaacagcacctgcagtatttgtccagacgtcaatgtgaagatattccatcgcagcagcattctgagtggtaagatctgttccctgataattgaaattagaatataccaaaatattatttccagatccagaaaccgcctgaaaagaagtgttcacacttccggactgtccccagttcggattatagttcgtagcaacattcgtataagcatcactgaatatagaaattacatctgccgctgcctgagtaggagtcggtgcgttagttgttggctgagaaaagccaaaactaaatgccaaaagcattaaaaaaagagataaatttttcatctttataaagtttaaaaattagtattatggctgaccgctaattttcagaaatagtattcttaaaaaatcacgaatcattttttgttttatttttttatgattttatatgtattggttcctttctgattttcaattttgattaaataagtacccgataaaaaagaactaaaatctaaatccaaagtcgtccccacattttttccaaaaagtttcttccctgaaaaatcataaagtgtaaccgtatttttgttctcaggtaatttcagactcagaacattttcaacaggattgggataaaacagttctttggctttaaaggaatctgtaactcccagagacatacacgcatcgccaactacgtaagaataatatttggttacggacattcctcctgcgtaggcaaatttcactgcataattaatcgtagaacccaaggtttgtccggcaatcgtgtgcgtaaacttctttccggaaacattggtcattggagtttctgtaaaaggagtttgtttccataaataagctacaacacctgtcttatcagcatctaaaagttcaaacgtaattttcacatcggttccgatggtttggaagtcgtatttgtatccggtagaaaacgctccctgcgaagctaaagtagatgttccgctgcaagcggtattgatattggaaagagtggtcgcatttaccgtgatgggattattggcagcggtatttcccgcagcatcgcttgctgaaatcgtaaatgtatagctggttgttggactcaaacctgaaattatcacagatttcggtattcctgatgtaccgtaaaccgtttgcgtcgcaccacccgaaatctgataagtaatcgctccaaaattatccgtcgcattcagtaataattctacggaatcgctggttactgctccaacagttgcggtaaaattagtaggtgcaacagtgtctggagtggtattctgatagactctcacataatcaataatcatcgaggcattggtaaatgtggaaggaatgtttcctgcaacaccgcccattgcaatattgagtaacaaatactgttctttatcaaaaggccaagtcgatgcatttttaacggcaggattgtaagtgtaatacgccactccgtctagcaaaaatgtaatttgattcggcgaccagttcatcgaataaatgtggtaattatcggtaatgtctgatgaagccaacattccgccgtggttgacagaatttcctgacgatgacggcgtatgcaacgtactcttaataaaatttactggagcagaagggaaaattccgtattccatcatatcaatttctccacaagccggccaattggtatttccataagtagaagcgaaatagccacccggttcgtttacatttcttcctaaaagccagattgcaggccaatttccttggtttttaggaacttttgcccgtacatcaactctgccatatttaaaagcaaattttgaatttaatcttgccgaagtataatttttggtatacccctgatcggtaaaggtttcttttttagcaacaatattcagttcaccattgttcgcgaaagaattggtgatgagattggtgtaatgctgttgctcattattgtaccaacttcctgttgtaggcaattgggtttgatgatgccattttgcattatccaccgcgccattggttgaaaattcgtcggaccaaaccagatcattatacaccacatcgacctgcgccaaatagagtgtgctgaaaaggagtagaacgatatggtgtatttttttgatcataacttttttaaaattttagattttagattttaaattcgagattaaacaagtctatattttttaatctcaaatttcttgcagcccgacttgagtggaacttttttcttttccgttgccttcgacttcgctcaggcaacggaaaagaaaaaagcgggatctcattgacaagctcaggataaacttctgacagatgaaacagcacaaaaaacttccatcttccatcttccatcttccatcttccctctccttaatatttcaacttctcgtgtttatcccaaatcccccaatgtgcgccgacttcaccttcgggaccaactttccaactttcatcgaaagaggaaaagtagaaacagtcgatttcctcatccatacaccacaattgggtgttgatgaaataatccagtgcatttttttctgatggaaaagcgccttttagttcttctcctttgcttggccaaccggtttcggaaatgataacaggttttccattggctgcctgttttgcctgataatacatctgcttcatataattgagcgaattttcggcgggacagctttcccaaaacggataacagtttgccaaaatgacatcacaagcatctgtaatccttggttttatcgtgaattcataataagcatctacgtaacctaccggaattttggggatttctttttttactcggttgatgaaatccagcaactcgtcttcggataaatcttttcggtacattacctcatttcctacggctgcaatgtctacaaaaccttctttggcaagttttatcaatccttccacttctctttcgttgatttcgggatcgtcgcccaaccaagctccgaccaaggttttcattccgaattctttggcgattttcgggatgtgttcgttgccttcagtgcaggaaaacgagcgaacccacgaagtgtgcggtttcaggatttccattcttcggcggacttgttcctcggaaatgatgtcgccgggtttttgtccgtcttcatataaactgaaacaaaagccgtgaacgccgttgtacagaatttctctgaacaaatcttttttttcggtttcggtttttcctttgatgtaattatcctgattttgcttgggtaaggataaatactgctctgctctgtacgacatattctaaagattattgtgatgatgaatgataaatgataattgatgatttagtctgatatttcttgtctgttttcaaaatttgaaattttcactggtatcccacaatccccacgaagttcctgcccaaccttcgtaatggattttccacgattcgtcgaaagaagagaaatagaacaggttaatttgctcttttgatgcccatttttgagcttcaatgtagtatctcatcagattttcgggagaaggttttgcgttttgtatttcttcgcctttacttggccaaccggtttctgcgatgatgatttcttttccgcccgctattttttgggtttgatgatacatttcctgcaaatacattccagcgtggtcaatggaagcgccttcccagaaaggataacaattgattaaaattttatcgcttgccatcatcaatttcgggtgattaatgatttcataatacacatcgatatacgttacaggaaaattcagtgtttgatttttaacttgttgaatgtaaccgagtaaagtttcttcgttctggtcgccacggaaaaggacttcgtttccaacagcggcgatatctatgtttccttcttttattaactgaattaaagactgaatttcctgctgattttctgcctcatctttgccaatccacgctcccattaatactttgaagcccatttctttggcgattttcggaatattttcgtgtccgtgggtggaagaaaatactctgatccattgcgtatgaggttttaatatttcgaggcgttttctgatctgctcttcggtaatgaagtctcccggaaattgtttttcggtaaaaacgctgaaacaaattccgctcattcctgctttgaaaacgtttaaaaattctgacttcactccttcaatattagaataatcatacgtcgggaaatagtattgtagaaatttctgttgcaattccgctctggaaagtccggcaaggttcattccttctaaaacattattggcaccgtatcctgaaggttttggggcttttcttttttctaacaaatctcttacttctctggctttggcttcatctacatcataatttttcatggtccaaatggcagtcaaagttccaagaatcggaattccaacaaagaaaattcttaaccaaaacatcgtttcatcggtttgtgtagcggcattggattgaaaagcgaccagagaaagaatcatcccacttaataatcccgcaacagcggttccgaattttaccatccaccaataaatggcgcctaaacttccttctcttctttttcctgtgttgagttcatcaatatcgatcacatcagaagtcatggacatcattaaggtaaacaaacttccgattccgaaggagaaaaacggcaacgcaaacaaaaacagatacggtttgcccggaatgaaaagtaaatacagtaaaatataacccacgattgaaatgccctgagaaaccaaaaatgctttcttcttccccattactttcgacattcttgccacgataggaatgactgcaacggttgtaataattgcgcctacacttccgaataaagtgggccataatccaaatccctcttcatttcctttgaacaaataatatttgatgatgaagtaagaaaatcctgctgtagtctgaaatgcattaaatattaaaaaagtagcaatacatatttttctgaacggtttaatttctaccgaagcttttaatccttctttaatttcaccaaaacttcctaaaattcctttcaaatcaatcgggctgtagttttcgtggagtgtcgatttgctcggaataaaaaatgccggaatcgccgctaagatggcacaaccaatagcaacataaatcgccaaagttcttaccgcaacatcactagatggaaacaaggactgatctgccatgattacccaaaaccaaggtgcaaccacccaagctaattgaccaatcaactgagaagttgccataatattggtacgctcatggaaatcgtcgctcatttcgtaacccatcgctacataaggaatactgaagatggtgagtcctgaataaaaaataagtgaaaccaccaaaaagtaccaaaaattgtacgtaacaccattttcagcatacaactgccacatcaaagcaaacgaaatccctaaaataatagctccagccaaaacatactgtcttcttcttccccatttcgatttggtattatcgcttacatatcccataatcaaatcaaataaagcatcataaaacttgggaataaagtaggttaagcctaacaaaaatccgctaaagccgagtttctctaccaatacaacggtgaaaatcccgatcattgcaggaaacatctggttcgccagcattcccaacccaaaagcgaccttttgaccgattggaactttattcgctgattttttgatttgatctgccatttttcttgtgtgtttttttaattaaaaagttaaatgaaccgtttgcaatgcttttgcattaattgttgttgatatgttttgattttcaaaagaaatttcaatattttttgcctgtcccgatggattgaagatcaccaccgcaaccgaaccgtcaggatttttagcggctgtaatttttaaatcggaatcgggattttcaaaaccaattcttacggcttcgggacgaataaatttgctgaaatgcgccatcgtataatataaaggcgttacatacacttcgtctttttcgggatctaccaaaatcggtgcgccacaccagtttttaaaccagttcggaccgccatttttatccaaaaccatattccaatcgatccagccatcgacttgattgttcaagcaaccgatgatgtctcctgcgtaacggaaaaccggaacgtatttcggatgcagatatttttcttcttctttcgcccagtcaaatccccaatctgtcgcttctgcgctccaataccacgaatcttctttccatttcggaatatcgccgtctatgcaggcttcagtttgaattaagtgttttgacggatttttctgatgcgcatattgcagctcgtcttcaaaaattttataggtgctgtcgtaccaatgaatggctgttcctgcaaaatatttggaagatttttcggagcggtacatttcgtctacccagtttttaagttcagaacggttttggtcgtagccgaaaattttcacgtttccgtagccgtctttttctaatttcggacctaagaaattttccacgaaatcggtcatttcttttggggtaaacaacatactttcccagtttccgccgtttccgtggggttcgttgattacggtaattccccagattggaatgcccagttttttatattcggttaaatattttgaaaaatagagtgcaaaggtttcgttatattgcggcaataattttccgttgatccacgcattgttatctttcatccaaggtggtgaagtccacggtgaagcaagtattttaaacccgttttttgaaattttctgcgcttctttaatcatcggaactaaatcgttcatatcttcctgtaccgaaaaatgtttcagttctttatcgtctgcaaccggagcgtaggtgtaatgtttcagagaaaaatcgcaggaagcaatcgtggttctggttaaagaataattggctccatcttccccaaaatacaattgcaatactttttcccggttttccttgcttaattggttgagcaaatacgcagaactttcggtaaaagcaccaccaaatcccgtaattttttggaatttctgttcaggattgagtttgattttaactgaattttcaacaggttttaccgcatcaattttggttaattgatttccgcttgccgaggtttcgtagatgtctgtcttccacgatttttgaaattgacaactcatcatcaaactggttattagggcaatatgtaagatttttgttttcatatttttggatttgttttccaaatatttttttatctcgctaattgtacagatttcgcagattaaaaaagtttaagtaaatctgcctaattagctaaatctgcgagagcattacctttttgaatcatctgaaaatcatcatttcgtttccaacaattttttttcaaattccctatgtggtggcatttccacactgtccaacaatcgtttcagatttccgttaaaggttttctgaatggtgtttccgtctcgttttaattttttaaacgcaccttcatccaccaaattccaaactgcatattttgcatttccgtcgacggtaaacaatccgaaatgattttcagagccacctgaatttccggcatctttccaaggttcatcaaacgcttcgaaatagaaacaggaaattcccgcttcatttgtccaatccctcattttatggtagaaaattccggctttgtattcatctactgctttagaatcgttacttccgtacaactcattggaaaatgttgcccaaccggtttcgccaatatgaattggtttatctatgcctaaactttgcatatactttttcaccaaattgtactgcgattttgcataattcacagagcgattcatcgccaaatccaattgtttttctttggaaaactgaaattcatcttccgaaatcccccaaaaaaccgggttgtaatgggtgtcgtgcatcggatacgtgtgcatcgaaatataatccaccgctttgatcaactcattgagttctttggtgtgatattctttgtctccaccgccccaacttgcaaaattgtcggaactggtaatccataaatctttcgtcaattcgccttttttctttaaattctgcaaatgattcacccatttcaaaatcacggaaggcagcacgtagtaggcggttgcccattttaccatcgcttcgtttcctacggcaatcactttgatgatttccggatattcgttcgccaattctaccgcgtgtgcaatttcagaggcgtttctttcgctttcttcgttatgattgggttcaaaacctgtccacgcatttttacagtcgatccacgctccgagcattacatacatttcaaattcaggattttcctgacgtaattctttaatcgctttcagcacatttaccgcttccggaagatgcacattgtaggttctgatgattttcacccccatcgccgaaaggattttcatatcttctttcaactgcaaaacggtaggttgcactcttctggaattggttcggtaaccgccgtacgacatcgctaaataatcgggatttcccaaaatttcggatgcacttttatgtttgattgtgttttgcatactgttacatgacattaaataggtcaaaataagaattggtattacacggaataatttcattaatcattgaaattttttcattgttgcccgataaaaagaattttcacctcaaccatttaaatgtttatgagatagattaacaggtcgctcctacggagctttgcattcacgcttccattttctattaacagtacgatcctaaaggagctgtattaagtcccatcgggacttactgttaataggaaatttgtattcttcggtaaaaagctccgtaggagcgacctgttaattacatttttttatcagacaataattatttttttttcattatttcaactgttcttttctaattttcactttaatcaaagagatttttccgtttcttttgaagatgtttgcggagtcttcttgattaatggttaaactgttctctatttttgcttcgcattgttcattaaaaatttctacgctttcggtttccgaaatttcatagattaccggaacttcacatttggtgaaaaacaacgaattttctggcaatttcagtgatgaagtattggattttacatcaaaatattcgattgttttttcttccgttaagaactcttcttttcttaataaatcggggttaaactgcaattgtccgtcttttactacgattcccaattctccgaaacggcttagcaagtcttcttttacctggcccgtcattcccggttgctgtgcgccttttccaaatggcgtgtgcgaatacgcatcggttggaaatgcaccgtacaattccggagatttgtgaacgccgattcctgcattgatttcgtagaaatgttccagtaatcttcccaccatttctggcgaaacattttcgttgatggctttttggcaaacttccattacggctaataataatttggaaaccatatgccaataaatggagcctaaaccttcgtaaccgtagaacgttccgcttcttcctgtaaattctttatgattaaaaacttcttcaaaaattcctaaaatcaaggctttttcctgattttcaacctttaaatcatctaaagctgattctagatctcctgcatttttgaaatttccattgaaatgataatttcctaacacatctttttcgatgatttgggtatttttttcggaaactaatttttgtagcaattctgacttttgaaccaaattttccggaatgctgtttctttctaaaaatcctttcagttgcttgttcggatacaataaataactgtactggtcttctcggaataaagctgaatttttcagcgcgtccaaaactttcaaagcttcttcggaagtcagaaattgagaactcaacacggcaacctgtccttccaacatttcgctgagatacgaaaccgccacggatttttcgttggaagtcatcaaattatacgcgtgatacaaaccgtcttttctttcgttggctttaatggaatgttccaaaaactgcaacgaaaggttggtaaatcttctcaacccttccaaagaaacagttcgttttttaccccaaaatcctttctgatacacgtgatttcggtattccgaagcggcttctccaaatacatcgaggatttttttgcggtcctcgttgctgatatttccttccagtaaatgaagattttcctgaaaaccttctcgtatttttttgtaaaaatccaccaattcggtagaaactttcacgttttccaaagctgaattttcaaaaatagcctggaagaatttcatcattcttcgcaagtaatacagcgtcaccatcgaaacaccgtttcctaccaaagcgttgttcgcatcgttccattccggacgttgcgtgttcatccaaatgccgccttctaaaatgaaattggacaatttagcgagaaccgttgccaatattttttcggtgaaattcaccttcaaaacatctccattttcatcggtaagcaacgcaccgtctgctcccatttcggctcttctttggtgaattttttcatccaaatcgaagtcaaaatcgatggtatctttcggattttttagaatttcttcgtaggattttattttgtacggaatattggcgtacacaaaaagctcttgatccaacaaattttctaatgaatttgggaaataattttcggcaaattctaaaaatttcaacagataaataatctgatgatcgccccaatatccgatgtagctccacggatcgtcggcttctatcgtttcccaatcgaaaccgtctttcgtaactcggtacggattgtacccgtcaaatgttgtggcattgaggaatttgaaaatcattccctcgataaaatacggataggaatgcgccaaagcttcccaattctggaaaatatctctccagttcccttcataatcgaggattttagaaccgtcgatttcacttctggtattgatggaaaatttgttccagggacgggaaggatcgccgtgacggcgggaaaatttgagcggtaaatattctttagccaatcttatgaaatccgcatcttctgtattttttaacgattcatttaattcaaaaagactaaatttttctggaagattatttaaaatttcttttgaatgattgaatatattttgattcgctttttctaaatatttggaaaaatcccacttttcgatggtgtaattgtcatcaaaaattccgccacgcataatgttaaacaacgtgttggaaaaatgtcggctgtctcgcagatcgtcgttcgtaaactgcaatccatcggcagaagcgactagttttttgagatttttagtgcctaaatctatatcgttctggattttttcggcaagattcttttcgtttttaatgcgttctatccaatcgattacattggattgagactgattaacattggcgataaaccaccattctttctcatcatttgtgtttaatgctaattcctgctgaataaaataggctcctttttcgcctttaatatcgttttcctgtgtaattttttcaccttttctgaaatttttcaactgaagtgaagacagcaaatacgttggatcttctgtgccaatggtaaaaacggtgtttgctttcaaggcttcacttggttctgctttatccacgataatggcacttaatgcaaaaattccgagtccggatattacgtcgagttcggtacgtttgtaggcatcgcccaaattgctgacacggttttgcaaatcgcttccgattccgtagggtaaaatattttgcagtccgtctaaaacgtttatatattgatttccagtcgctaaatttttgatttttgattttttgatgaacccaaattcgctgctgttgttccattcataagaaaaagcgagtgctaaatcgtggttgacttcttcaaaaataatcttgtttccaaattcgtttttatagacatttctcgaagtgtgaaattgcgcttcattgcgaacggaaaaaggttcccagacgataatttcctcttttttacgaacctgaaccattgttttgctaccggtaatttctgccgattcggtaattttatcatcggtgtaatacgggaaaagggcaaattcagagttttttctccccgcggaaagtccgccattgctggaaacgaacatccaatgattggaatcgcttacgatggtcataaaaaacggacgcaacgattctgcatcggagattttaaaaaaaacttcgtggttgatttttacagtttctaaagaggattcgatatgggaaatcgtggattgcattaatgtaattttgatgtattatttttaaaattggtttgtaaagcccttccgaaggaaaaatttccttcgttgaaatgttttgagagtcttgtttttgggaaaccttacaggttttgaaagcctgtaaggtttgagtggtttaaaattttattttgctttgtaaactcttacataatcgatgtacatactttgagggaaagaggttccgtccgttggaaatcctacaaagtttcctcctactgccacgttaagaatcaggaaaaaaggatgattatacacccactctcctgaaacatccgaagattttacgcgatgataaaggtatccgtctacaaaaaagtctatctggttttcctgccattctactccaaagacatggaagtcctgatcgaatctggcattttgtaatccataggcttttgtttttgcatttcctccggaatatccgggaccgtgaagggttccgtatacgacattcgggatatgccctttcagttccatgatgtctatttcgccacactgaggccatgaaacggtattgatattatcgcccaacatccagaaagctggccagattccgggaccataaggtgttttgattcttgcttctatttttccgtaagcatgagaaaaaagtccctgtgtttttactcttgccgaagtgaaagcatttccgttttttcttgcggtgattactaaatttccatttccgtctaaagaaacattattggtggaattggtatacgactgcaattcctgatttccccatccgttatctccggttcctaaatcgaatgtccattttttattatccggaaggcttcctgcggtaccgttgaattcgtcactccataccatctcaaagcttctgtcgggaagcgtttgtaccgattcctgatcgcatgaactcatcgaaaacaaaaatgcaggaacagccagaagttttaaaattttatttttaggtaaatatttcataattgttcttttaaaattttagttatggaaataaatattatcaaagaaaatatctccgtttccgtctactttgaattgaatgatgttgctgagtacaaccggtgagaaggaagacagcggaatgtctacacttttccagccattggtattgatcccaattcccgaaggtacagataaagtatacggcgtttctacaggaccgggactgattaaatagaattttaaatttgtagaattagcggtataataatctatatgaatgaatccataggatgaagcgttaagcggacttgcaaactgggttccctgatagtttagtcctgcatatttcagggtattgtttcctgctatcggagtttgggaaacctgtgtagcctgtccccagttcggattaaaatctgtacccgcaacgtttgtataagcatcactgaaaaccgaaagaacgcttgccgcagcatgagttggtacaggtgcagccgcagtaggcgttgcaggaattatgcttccatcgttgtagaagtaaatattatctgcataaaaattagaaatattggctccttcaaaaattatctgaccgatatgcgctttcgttgttaaccctgtaattgctgtaatgggaatattcagactgatccagctctgactttgtaatgaagcggtatttacggtgtactgccctgttttatcatcagttcctccatatactccatctgctccgaagtctgctacttttatggtaaaagatgatcctgcagctacagcattcggtaagtacatatccatgcgtaaatgtgacatggatgatgcatttacagtaggtgaagtcatctggattcccacaaaattaaagttggtatagttaagcacatggtcattatttaccgtaaaatctgctgattgtgtcgtttgatatggggcccagtatccgttgtaataatccaccggaacattggtgtatttatcgctgaaaatagagataacattatttgctgtctgtgtcggtacgggtgcatgaacaaaatttcctgaggaattaatggtaaggcttcctgttgccgtattgcttcctaaagttgcggtaataacagaagaaccggatcctactgtacttacatttccaagttggtctaccgaagctaccgctgcattggaagttttaaagttgaaataatacggcgtaaggttcactgcctgtgttgctccgttgggcatactgtaagaagcagtaagtccgtcgattttattattaacgcctacaaaagaggtaattgttttgttgcttccgttcaggatagatgctaactgataggaaatggttccgagtttttcaaatttcacctcatctacccaaaaggtatatcctttgttgttttcgggaccttcggaatagaaaaacattcctttttccatttttagttttgaaggatcaggaatcgggatgattacttttttccagttggtatttaccggaagcgcagaaagggaaacctgatatttgttttcaccaagatcgtttccaaaaccgataatatctatattcgctgcctgagtcgctttgatccagaatgttaatgcattgtaatctgaaagatctcttcctacagaggtgtaaaaagatcctcctgcgtaagctccttcgggacttccgtaatccggaacggcaaatttcatggaagtggttcctgaatattttacctgtgtgtctacatcaaatgcttttacatcggatcctccgaagacggaataatttaaccctgaactgaaggcatccataaaaacttccggatttttaggatattctgccgtttcaagctcgctgatgtctctctgacagccaaaagccattaaaagtgaagcacttaataatactttggtgaatttatgtctgaatatatttttcatttttgtacaagttatttaccgatattgatttgaatatacgttcttatttcccattcgtttccgttcgggaatccgattgcggtaggatcaggaacccagtttccggcaccgtttatggtataagtaggtgcatatctcggagaatactgatctaaagttctgtaggtaccgcgaactccgattcttgttcccggaaggatccaccattcgggttttcctatttcaagggagagatctcccatgagctgcatcgggaaagtaaggttataatctctgtggtaatcgtaaggtccccaatcgttcagtttgaatgcggtaacaaattttaattttttgtaaatggttctcagctctaatccgaatctttcgatttttctggtatcgcttccatttgcctgtgccgttccgccataaatattggctatcactccgaaatcggagcttactttagaaacaattcttgcattggcttcccaaagattggctgccggtgcagctcccggaaatgcgaaagtggttcttccgtccggtaaaattcctattgcagcatcctgtgttgtcggcaaatgtctgtatacaaatcctgtactgaatgcaaatggtgcatcttctgttttatcgctgtcccacgcgtacatccatgtagccggagtaggatcatacgtgaaaagaatttctcctgcggtctgctcgcggtttgctcttaccacaaaaggatcctgcagtatatttcttggtcttcccggtgcaggtgcgtccattggaaccggtccttcgatcggcttttgccaaaggaaattaggcgcaatctggaaattcccgatgttgtaggtaaatcctgaaaggacattatactggtttccgcttccgctgtcttttaatctccatcctgtaaaggtctgtgtgtaatctgctcctccattggcaaccagacccatcatggctccctgtgcgtaccagttgaattttccgcctgcgtaggtaaatttggcttttccaccccaattgtctttgccgctgatctgatcctgataaatgtttccgtctctgtataactggaatgttcttccgttaagcggctgtcctccccagattccgcccagatcaattccgaagtttccgaattttctctgaactgctaatgttactcttctggttttaggctgcggaatggcaaatgaactttgtgtatctcctctctgatccagatcttcatgatagattcctgtaagatcgaattttcctgcttttcttgagtattttactaacaatgcagggttggctccccaccaaagttccggtccgaaagcgactttcagcccgttgatttctttttttcctgtgaattcaaaaccgaaaggggcttctccgttgtagatgtccatattagggccgtaattggcttcaggatagagtccgaaaagatcgccttcgtatccccaatggtaatgccctgttctgtagaacccgtgaagatcaaaatatttctgattccatgtataacttgcgttgtagacctgaattctgttgagatctctcattgtagttgtggttccgtctgcattcattacctgaattgctcttcctctgttttcataaaatatctggtcgataggattttctgccacatttcccagaatattaaagttaacattggctctcatattggctgtgggatttccttctattcccacgtaataggattgcatatgatcaaagccctgtctgttcggataggatgtataggcatctgttttttcttttggtgtggtgataagacttcctccggtgttgaaggttgaaaaatctgctctcagattgctgattctgatcatatcactgctttctcctttcagagcagctttatcgcctcttgctctcagatttgcatcggtaatattgatgtcattaaaatagtttttaaccacgccggaagatttcatctgagtgctctcgtaaggattgtactgatgaacctgcttcagggtgtaatatgcgcttctcggatataactgatagtgtcctgtagcatctgtttttcctttggcacagattccgaaccattcttcgttcatgttattttcgcctttccggaaatctctgatgtatcctccgttgctccacgatgcattggtattgtgtacctccagatcttcggtctgtttgtatttccaccaaccgtcgctaaactggaatgtaaatcctcccagtgcatttcccgcttttcccaatccggctgcattttcatagatttcctgccagtttccgagcagataataagactgtgcatcctgatcttctttttgagaaagttcgttaaaggagtctgctccaaattcggtgaagagaaccggttttccgtattctgtttttactttcaggaagagatcgccaaaagaaacgcctcggtatacattggttccgaaaatatctacatctttacattcctgagcaataatgtctaaaaacagggtgtctccgttacataaagcaacaggatggttctgatctaaagattttatttctaaagctgcctgattgaagagctgatacatcgggattgctttttgggtagattttctatccttcataggaatatcttccgtttctgcgccttcccagaataggccgtaattattttcgttccctaaaagataaagcaaaagtcccggtgtatttttatactgttctgccagttctctggtttctttcagtaaaagttccctggttgcaggatttgcgtaatctgtgtttgccacccatgagccatttacggtaagcccgtatcttccgaaagaatggttaagcatggtataaattccataattttcgtagatatacgtaatccactttgcaggaattccggtgtagattcttacggcatttacgcccatatttttcagaagtcccatttcatcgtccaaagcttttttgatgaaatcatcggactgtttccaaagggaataattataattggttccgacaggatagtaatcccagttcatcccgtttacaatgaaaggttttccgtttacttctaatttttgtccgtctgtgttattcgccacctcaactttctgggattgggcatgggaaagatgagcgccaatacagactaagaaaaataatattcttttcattatgttatataatttctattcagttttataattcggacaagacctcttatttaatgatgaatcgtctttgcctaatttaaaaatgttaacaattagttcataaataatatgtatatacatttgatatacataaataaactattgaatgtcaaacacttaaacagcaatcaagaagcaataaaatcattttcagatcaaaaaatcagttgaattctatgaaattgaattaagaattatttaacattttacagctcctaatgcgacattttttaacattcagataaaaatattaaaatgagaaatctgctttaaaatttcacatttttgagaattttcaaacaatttactttcaaaatattttgtgaaaattcaatcttcagggttaaaattttctgagaatttctgaaattaaaataatgattttggcgaaattatttctaagcgcatctgctttttaggacaaaaaaaaccatccgaaaatttcgaatggtctgactgaaatcaatgatttaaattttgctttttctatgctgactcaataggatgagcctaaaaactgaaagattattctctaaatttaacgatcatttttttggtatacgctttattatctgaatctgtaactttcagcagataatatcctttaatctgtaaaggcagatctattctcacttcttctgaggcactgaaattcttttctaaaataagaactccgttcagatcaataacctcagcttttattattttttttcttgtgtattctgaaccttttctgtgttccagccttataaatgcaacatcgtttacaggatttggatacagatgaactactgtcatttcctgttcctgtgctttagactgaatggtattggttactgtattggttttcagaaggttttcgtcatcaaatgcaatgaatgcactgtttttaatttttgtatcttcttctaatccttttttaggaagaatggagaaggtaacatacccctgagatcggtctgaatcttctgaagtaggcggtaaaaacacattttccagcttaaacgtgatcttattgtctataatttccacagatacgttatcatgacttgcagacaccattttaaaggtattgatgtctaattcctgcggaatgttatctataatggatacattctgagtagcaaaatttcctacgttttcaaatctgatggtataggtaagcaactgatcgggtaatatatatccttctgttccatagcctttaggagaaaccagaatatcattaggatctatcgctccataaacagggtatttttgcatcagcaggttatcatcgatattgcagtctgccgatgagtttacaatttctcctttaaaatccaattcatcacccactgaaacggatgcgtctgtaccggtcataaaactaatgactttattgttaaaaggatttaaagatcccatactccaggaatatcttgtatagttttttgaattttcaacaaagctttcctgctgtgcaatcggtaatgacggactgataatatttacagaggaaggtactgtaaattttaaaatgcttgaattggatatattacgggactgattgcttactacaattttaaactggttattggtatatccttttcggatagccgttcctcccatatttatttttaaatctgtatcgttacaggttgacgttgcagcgataaatattttttgggaaggctgataattggtcagatcgaatactttggaacctgcacttaatccgttctcttctaaaattctcagctcaacatcattctgagtggtataaaagctgaatgtaccggcatcactggaatatactttggcattggtaggcaccactttaatagccgctcttgaaacggtaggttcgctgtcctgtttcaccccgtcgttattggtgtcaaaataaacgattccggaaacttttgtctgttgaggttctacgatttcgagtatttgattggcagaaatattcgtcagtttctgaatgattccacttgcccatttaacggtgatggtattgatggttgcggcgtttcctaatccaaaatgctgtgtatagctgcttggtcctccaaaaccactctggctgtttacttctctcatctgcgttctgcttcctgtttctacaaatatttttgtaccgatggcagaaccattgctttctgtggctttcagattaatttccagccatttattcgtatttccgttattgatgaaaatatgatttttctgattggaatgcgttgccacggcaagatccagatcgccgtcatgatcgtaatcgctccatgcgtgtccgaaagaaagtccgaaattataagtaatcgcttcgtctctgttttcggtaaaatttccgtttccgtcgttaaaataaaggaattttctgattctgtcattggttacaaacaagtctaaatctccgtcattatcaatatctgcaaagctgcatccgtgagaacttcctccctgattaacaatagaactggttattttctggaaatttccgtttcctaaatttttatacaggaaattggttgttgtattggaattggttacgaataaatccaaatctccatcgttatctatatctccccaacagcttcctacggattttccgccttcctgattaatgatgttatttttcttggaaaaggttccgtttccgtcgttatggaataaagagttcttatttccgcttccattagggacaaataaatccatcagtccgtcctgatcataatctgcccatgttggtccaagagaggaattggcttccagcggaatggcatccgtcacttcttttacaaaacttccgttatttgtatttctgtgcagctcattgtattttgtagggaaataattacacataaatacatctgctttgttatcattatcataatctgcaaaggcaccgccatgataataggaaacatcctgagtaaaagatttggtattgtctgcgaccaatgtaccgttgtcatttctgtagaaacggttgggatttctggtattattaagaaccaataaatcttcatctccgtcattatccacatctgcccatgtactgctcatagaaaccccgtcttcaggtaaaacctgtcctgctgtaaagcctccggctgtattattcataaagattcggttaggagaagtaagtcccatatctgtaatgtatatatcatcataaccatcattgttgatatctacccaactgatagtccatgagttggaagtaaatgaatcaaacaacggattttcaagacgtgaaaatatcagttttgaagtattggtggtctgtacagataccgaattagcgatggttgactgctgcgtttctccgttcacttttcctgttatcacggtttcaacggtggaattaagcgtggttcctaccagttctccgttattggctcctacggttgccaccactttggtttcaatctgatacgtagagttcggctgtaatgtcggtaagttattatattctacttttgttttgtcattaagttctgtaacaacaccctgtgtttgggattgattgggattaatgattttcgattctaccactttaagtccttcctgtacaatgacttctaccgaaggattcgttacttccccgcccgttttaacctgagaaactacagttgcctgttcagtcgggatgagcgcatcgtcgcttacgttgcttgtctgggtgaaagaatgtcctaaagaacttccggtataacacatccagttatcattaaaattactgttcatcaccgcaatatcattattgctttccacgatcagataaggtctttccgatcctgaagctgttcctgttccgttgtaaaatgctttccattcatttagacttatggagcagtctgcatatttctcgggagtaatggtaaatgttttattaaattttgtcccattggttaaagcatcttttacggtaacggtagctcctgtttttgaaaataaatacaggtgagaaaaggaaccgttatactttgatcctgttaaaggattggttacattggtttcatttcccggaggagcaatataggtcaggaacttttttcctgccgttgttccgctttcggaagaaaccattgttgccatatcggaggttcccggagaaccggtttcaaaccaattcccttcaaaaacagagactttttttcctgcggaacaggtaactctgaagacggtaggataagaaacgtttccattggtttttcccacccagtctcccgcggctaaccgattgagagagaaggtttgtacaggtacccagtttccatttacaaaacgatccagtttcacgctattggcattgtcccagctcacaattcttatttcctgttcaccacccgactgataaggaaccgcgaaatacatcagttctccggaagagcttccattagaggtaggcacatatcctcctccgtcccgctcatttccgaataaggctccgtactgcatcgttacaggcttattggcaaccaacatataggtttctcccgaaatcatcgcatcccttccttccggaaagctgtaaattaaatcctgaccgacgttcagggttttggaaaaaactttaacggcattttccgtatcaacatccgtaaaacctgtatttgtttttgcctgagtagaaattttataaaagtctattaccgtattattttgataggcaaatacattaatatctcttttagaagaggtaatcatgggagcgtatacgataaatttctgtccaatagaacttttatccacacttggaacccagtcgtgttgccagtcgctgtttgtactttgggaagcatacaccagtttattggattttacaataaaatagtctccgtcccattttaaaacaccaccggaagcataacgggcatcatcattaatcccattgtctttaatatacaggacgtagctctgccctgcttttaacactccggttttagaatcatccgtatctccgtccgcgccgtcatcaatgatattaaattccgtatcatcgtagatagccgttaccactaaacagacgtttctttgtacggcatcgttattcggtggaacataaatttgaaagtacgttgagggctctcctgttgcatagagattatttacccctaaaaaaagaataaataaaaagaataaatttttcatacttgctgctattttaggtagtagaccgcattcaacaaatatgcttattttaaaatgtattgattttcaaaagcttacaattttttctttgaaaaaaaattccaaaaaaaagattttgtttcattttttggaattttaaagagtttattggctcaatgcaaatagtatgcaacgatacccttctgaaaatcagaataaaaaaaatcaattatagaaaatacaagactcagaactgttatagcttctatgcatgattttacaacaatcacaatatttgcttttagcaattagatgaaacaacaggaaaaattaaagagaagatgctttcatcctctttttattaaaatctaaaaatcaaacacttaaacctctttcattttccagatcatggaatgggtaaattttcagaatttttaaaacaaactcctcatctccttgttattgcaggaaactttctactctttcatacatccagtaacaggccattacaatcacaaaaactgaaacggcagacctgtaaagatcgatatttttaaacctgttggaaacatagagaataaggggaaaacttatcagtacaatcaggatctgcaccagttctattcctatattgaagcctaaaacactccatataaactgactgatatccagattaaaaaacgtaatggtattggcaaaagcaagaccgtgcacaaatccgaaaagcagggcaataagaacttcttttccgaaaaagatgggtttggagatgttgattccggacagtaaaatggtaatcgcaatcccgatctctatattattcgggttgatgtttattaattgtatggctcccaaaataagcatcagtgaatgtcctacggtaaaagcggttacgatctttaccactctttttaccgcagattttttattgtgcagaagtttccattttctgtcttctacaaaaaacggggcaaccagaagcagggaaattaaaaacaaaatatgatctttcccttctaaaatatgacgaaagcccatttcaatcatgcttttgaaacctgtaaaaaagctaccttcctctaatgatatatttaaaggttgaatatttccgtccagatcccgcgctgcaacccccagaatctgattagaattctgtactcctttttcccagtcggaagccaatcctataatcgatttgtgattatagatctggtgtacaaaggcatcgtaatgaagggtgaaatctcgggtatcttcttttttttgtggttttgccgtaatcctgaaatctattttatcatacagcccgaccacagaatcccgtgttctggagatcttataatcaacaagttctatattccagaatctgttttcagaggaaattttgatatgatctttaaaatactcctgaatcttttttttctgatccggtgttattttaacgttaaaaacgatttcaaaatcacgaagcggcgcagtaatatcaatggctgcaccgctcggatacatatgaaacatgaccttcgtatccggcagcggatgcgccgatgcaaagactgaaaaaaagacaaataaaagaaacagtttcttcaaccctttattttttgatgagtttttgtccgcttgtttttgtaccattgtgttgtatattgaaggtataaactcctttttcaagactgcttaagtcggcagagacagaattttgtcctttcggcagattgttcttttctatgctcttcactaatcttgcgctttggtcatagatgttgatttttgtatttcctttttctgaagctgtaaagttaaaagtagcaaaatcctttaccggattaggataaatcataggtttagaaatggaagtattggtttcatccgtagataaggtatttcctgttcctccgtaatctgttgtatgatctctccaaatgctgtgaggatgtttcggcgtaaggataattccgttctgtacagaatattctatccataccgatggtccgtctattcttacataaccgttctggttactcagtgtggcatcggtagaccatgcaatgtatgtattatccagttcattattatattttgtcataatggttgccgcattcgtatcgtccacatcatttacgtaggttgcaattgcattgtagacaagctgtttctgagcggtcgttaaattgcttactttcagtccggattttgtggtcgggaacagccagtcttttccgggaccgcagaccaaatcggtatacgttgtggaaagctgtgccgtagtaagctgtgcggaagataatccggacaacatattcacaagagccgttttctcttcaatcattggttggtaggttgccgaattataggtaaaagaggcaaaaggttctgctgcgacaaaagaaggagttgcccccacaagaattccgttgatataggtgttggaaactgttctgtgatgtcctgtcatctggatttcaaaagttcctgataaagatggagttccgaaaaatccaatataaaaattaccttctccgtaagtggttccgcctccgttgtttgaaagataattgtctgccatccaaagtccgtagatctcgttatagccttcatttcccgttcctgataaagcctgaatgagatttctggcagcagttaactgagccgttgtaagagttcccattttcagcccgattcttggggacatggcagcaggaagattagaccatgtttttgcattggcgtacgtgtaagccagctccagcgttgcaatctgtgaactggaaagggtggctttgaaggcatttgccagatcaataatctgttgtgtggtaaccactgttttcgcagctttatttttcttggcaatattcgtcataaacgctgcttttggggtttccgtatcttttttaaaaaagctgaaaaatgaaagtgccgcaacagaagtggctacggtgatgctgaatagtgttttcattgtataagtgtttaaattataggtctctaaaagttgtattttaaaatcaatcgtgcattaaagggcgttcctgccgtgtaatgtatctcttccacgctttcggtttcattttgcagacggctttcggtgaggaactgggtttctttccatttggtattgaaaatgttatcgatattaattcccacagaaactttcctgagctgataattcacagaaaaatcagtgataaaatacccttttgctattacagaattatcctcattcgcaggtcggtctcctaaatatcttgcattgatgcctgccgaaaaattcttaaggtttttcacagacaatccactgacaaaggtagttttgggagcaagcggaatgtaatcgctgcctttagcttcttctatggctcttgcgtgagtgtaggtaaaatcggtattccagaaaagccagttgttcagctgataacgcaatccgacatcaacaccttttcttgctgtttttcctgagggttccaccaccgcttcatcgcctacataaacaaactcctgttcgagaaacagataccacagtgaggcgtttattaatacgttgggaagaggtttccacgaaaatcccaaatcggcattgtaagaagccggcagaatgtttttccctttttcggcaattaccactcttgcatcattgctgtgaaagccttttcctaacttcagaaaagcattaaaacctgtattaaaagagtataaaaaattaagtttcggactaagaacagcttttgcttcagactgattctgatatttttctgccaattgatccacaacattaaatttgaaataatctaccctcaatcctgcattaatcagccactttccgaaagagaaatcccaactgccgtacccgaatagattagtctgattaatatctcccaaactcagatattgcaaaacggtttgtctgttcttggtatgagaaagttctatatccttattgttatcatttcgtaaacctcctccagttttaaagctgatattgtcatttattttcccgttgtattccgattgaaatcccacaatcgttctgttgtctttctgtctgatctgatctccgttgatggggtcattcaggaaaaaggtaaaattggagtacagttcaaaatcatatttgttgaaatacacctgatttctgataaaagaatcatcattcatttttctttcgtactgaagattgaaattgcttcggcttgttgtgcctccttccgtattgtctattgctccaaaatgcgaaataagtccgctgtttacagctctttccggtatttgtccgcttgcatcccatttgctgttaaagtgcgaaacagagacagacagtctgtctttatcgctgagtcttgaggtatattttccaaaaaggttgatgcggttgaagttttgaggagcatcaaaataattatccgtcattaaaaactcacctgcaaaatatgctgactggttgtttttgttgagtagattaaaaatcccgttggttctgaaggtattaaattgtccgatttccaatcctaaactgcttttgtcgatgaaatctctggttttaaaagctacaaatccggcagtggcaaaatcgcctttatccgcaaaataagatcctttatcaaaatcgatgctttctacggtttccggaatcacgaaatgcagatcggcatatccctgtccgtgagcgtgggacaccatatttacaggcattccgtctacagaaatggcaacatcggttccgtgatcggcatcaaaaccgcgcagaaaaatctgctcagcttttcctcctcctgcgtgctgcccgataaatagccccggaacttttctcagcagatcctgagatgaagcaacaggctgtacctgcaaatcgattttcgaaatggtatttaaattttttaaatttttcgtaatggtgatttctttgatctgaaatgatttcttttctaagataatattcaggttttccagatttttcagaacgatcttttgggtctcaaaatcctgatgaacaaattccagactatcctgcagatttacattttccaacgaaaaattccctgaaatatcggtatgcgtatgatacagagatttagaaatattttttaccaaaacattttctaccggatgaccgttttcatcagagataatccccctcattgtattctgggagaatattaaaaccggaaaaagaaggaataaaagaaatttcatttcatttttaattttttgttgtggatttctaaacctcacaggttttaaaaacctgtgaggttttggttaagaatctttttatgaattagtcgttgcataatcgttcactctgtctctccagatggagtgataatgcactccgctgagaacaatcccgccctgtacggaaaattcgatccacacttttggacctgcaattctgaagtaatcattttttaccgtcatcgaagtatttccgctgtaataaatgtaggtattgtctaattctgaagtgtaggttgccagaatagaagctgcattagtatcggaaacatcgtttacatacgttttaatcacattcagtaccagtgctttttgagtcgcatccaaggcagaacactgcagccctgaaaaagcagtcgggaaactccagttggcgttgggaccgcaaacgagatccgtaaacgttgtactggcttttgcagtggcaagctgagtggaagaaagtccgccaagtaaagcaacaatagcatttttctcctgatccatcggggcatacgttgtagagttaaccgcaaaagacaacggttctgtagcggtgaataaaggggttgcagccaccaaagcaccattgttataggtattggcaatggttttatgatgccctgtaaacataatttcgaatttacctgttgcagaaggagttccgaagaaagccagatagaagtttcctgagccataggtgcttcctcctccattggcattgagatagttatcggcatacagcaattgctgaatttcatcatagccttcattagcagcagttccgctcatttctttaatgatggctttggcgatacctacctgtgttgcattaagatttcccaaaggaattccttttcttgcagacatcgcggcaggaagattagaccaggttttgatgttggcatacgtataatccaactgaagggctgcaagctgtgaggaagtaagcgtagcttttaactgttcggtaaggcagacgattttggaaacgcctgttacggaaccacaggccgtaacatctgtagcggctacggatgctgctccggttgtacccactgcattatcggatgcgcctcctcctgtagtgcttgtagaattaccagaatctgcagaatcgctgtcacccgaacacgaaacgataaccgtacccagtgtaatacccagaatacttaccatcgaaaggatctttttcataatatgttattttaaaattcattacaaaaaaaatcaataatctgatgggtttcaggaaagtgtggtcaatgataaaatagttgtggtgaaaatgtatatttttaattttaacctcagttcgggacaagaaacaaatttaaataattgatttatagtataatatattaatttatcgcaaagaaaaacaaaagatttttttacttattgaaagtgggtaagctaaacaaaggcacttcgtttatttaaaaaagacaaaaatggtattactttgataagttttacacctttgtatatcttaaaagctgaatttctgataattgaatctctttatttaacatagcgtttaaaaagacttatcccgaactcacgttaaattatatttttttaagaaaatcttcttcataggtattgcctacggtaagcgcaatatcttttatatagactgttttgtttctgaaggaagtaattttcgataaagaaacaatactggaacggtggattctgcaaaaactgttctcaggaagtttttccagcagttcttttatggttattcttaccaaaagcgatttttggttttcaaagtaaaatttcacatagttatcctgtccttcaatataaagaatctcactgaaaacaacttttaccaatccgtaatctacccgaaaatagataaaaccttcatcgtgggcagagagtaattttttttgctccgccactctgtcgattgccattttaaaacgctgaaagctaaacggtttcaacagataatcgaaggctccgatttcatagctttctacggcatattctttataagctgttgtgaagattaccaaggtttcctgaggaagtgttttgtaaaaatcgattcctgaagttgcgggcatattaatgtccagaaaaagtaaatcgacaggattgttttccagaaaatatcttgcctcgctggttttgaggaaggtcttttttaaatcaacagtctcaatattcgcgcaaaatgcttctatgatctctaaagatggcaattcatcgtccagtgcaattgctgtaatcatatcaaattaattttcaggtttacaacaaatgcttttggatcttcttttatttccagcgtgtgtttctgaggataataaagcatcagtctttcttttgtatttttaattccgatattgctggactctatatttttagtggttacgattctgttgaaaaccgtaaaattcaattcattttcctttatagagattccaatttttatttcagaattctcatcaggatttacaccatatttgaaggcattttccacaaaagtgaacaagatgaggggagcaatttttttattataaaaattcccttctttttcaaattcgattataacggaatttcttaatcttgatttctggagttctatataattgctgatgtattggatttccttttccagcaacacttcattttgataggaatcctgtaacaaataccgcataaaatctgaaaaaatcaagaccgtatctgccgttttatcatctttttttatggcggaagcgtatatgctgttgagggtattaaacaaaaaatggggatgaatctgtaacttgagatgagaaagttctgcctgcaatttttcgttttttattttttgattctgcattctctcgaaccagaatgtggaaaaaaacacggttcctccaaacaggaataccaaatgatccacatctgaaaaaaatagctgaattttatgaaaaattgtctgatcatgggatctcggatggatgggcagctccggaaaatccggaggaagatgggagccgaaaagcatccagggcaaaagcagaacaaccaacagtcctccaaaaacggaaaacccgtattgcagatactttttctgaaataaaagtcgtgggatgaggtaagtataattgatgtaaaaaaagatgaggataagcaaattgcccaatatattttctgataattccttaaaataatgcggctctgagctctccattggaaacgcaggaaatacaacgggctgtaacagaaaaatcagtacccctataaaaataaatacttttcttttgctcatacttattctgcaaaattattgtttttgtacttgcaaaaagaaaaatgttgtgaagaggaatattttgggggcgaatgtttatttaacaggatttcaaaaagtggcttcggctccgctcagccaccttcgttttatgttcagccaactggttatatgctcagttaccttagttttacgttcagccacctgtttatatgctcagtcaccttagttttatattcagtcatctgtttagtctccttttcaaaatattcttaacttttagtactaaaaaaaatcaaaatacaaaaggtggatgagcggagccgaagccaccttttgtgtttcagaaacaatcttagttaattatcaaattccaagctatgttgtctccggcttctcataatgtcctagccacggcagttcgcgcctgcaattgttcccactttccctgaaaatcctccaaggattccttttgttattcgtgccattttgtgcatttttattggttaacagaacgaaggtattacagaattttccaatttcagtcacctgtgaaaaaaatgacgggtttttactgcttttgaccggttttgaccggtttgaaaacccatttcttcggatcatgttcgggtcttcttcggatcggcttcggaaaaatgggattttttccgaagaaagaccgaacaacagccgaaggatttcgggagaattctgagtggttttcttctattcaggttgactaaactttttgcttagcccccaacttttgagactgatccattataaaacaatccagagacaagaaagtaaaacccgacattcatatttttgaaaacggagatacccgaaaacaacttctggcaagaagccggtatttactttacaaaagcagggaaaaatggacagaaaatcaaagtaaacgagtaaagatcctgtttagagaatatcccgacctagaaaaaatctaccatttatcggatagtttaagaaaaatatacaatcaaaatataacaaaatccgttgccatgttgaagttggctcattggtttaaggatgttgaagagtcaggttttaaatcattttctacactaaagaacaccattataaatcattacaacgatattctcaattattttgaagcaagaagcaccaatgctgctgcggaatcttttaatgcgaaaattaaaaacttcagactacaacttcgagggtaaaagacagagcgtttttcctgttcagattagccaaacttttggcttagtccccaacttttgcgattgatcccaacttttggctatgatcttaattcaaaaataataaaatgttgcagtattgttgcaggcaaaaataaaaaaagcacctacaaatctgcaagtgcttgatttaaaaagtggtcccacctgggctcgaaccagggaccacctgattatgagacgaaaaaagttactttacattttgttgcattctttttcattaatctgaatttcaacaaaatacaattttcagacttttcatttcttaacattactttatattgttttgacaaaatgtttcacctatgtttcacccagctattttagttgatttgcagaaactgcaagaactgcaactattacaacaatccctcatcattaaaactcatatagctatcttttgtaataataatgctgtcaagaagagctacatcaagtaatttacaagctgtcttaagtttcttcacaatggctaaatctgaactgcttggactaaggttaccacttgggtgattatgtaccaatataagtccagtagctaaacattttaaagccacagctaaaatcaacctaatatctactaaactccctgtgataccacctttagacaagttgtaaattccaattactgcatttgaagagttcacaaagagtacctttacttcttcctgcatttctattatactttcatcccaaattgtcctgagaacctctatcactttactgcttgtagtaagagtaattccagacattttacatggataataggctacctgtatttctgatactgttgtttctgtattcatttttaagtttttttggagtatgtgagggcacagctcatatcatgtttttgtaactccaaaatcgtaaaacgtatttaaaacctctttctggtacatcagaatagttaggttttcttcttcttgataatatagttttagagtaactgaactaggaaaggtgatggtaaattcttccagcttatttttaagcctttcaactttattttctctgtatttcaattcaactctcatgagcctgtcagcattaaagtacaatagtatctgctttacctttaacccaagaacttcgttaatatttccaaagtactcataaggaactaaagacagattattttcaataaactcataaggaggtactgatataacctcgaactcaaaatcattgtgttcatcatccagcctaaattttaagtgcttatataagtcattcttcatttatttttagattgttaaaaccacctggactaaaggtggttgtattattgtttaccaaggcatttcttggtcatattcttcaaaaatttgtatgcattctgtagtttctatacatccatctttgattttaattgagagataattccccttggctttattaaagctaggaatgagataacctggaactaaaatttcacaattaatccagtcatgaaaaaccttgttatcatcttcaagaatttgattaacacatgtcttctggtaggcttcatcattaaatctgctgtatatctcacagatgtaaagttttcctctgtttagctcccaggttataatactgttgctaaggaagaatgtagaagtagtaattatggtgaacacactctgtttaaggtcttcattaaaaccaatgttacctgggatgtaaaattgaataacttctaacaccatcacttttgatttgctgtacaggcagaatctatgtttttgtaagttggattgttctttctgtcattagtaaatgcaatgtataatttatcctgtcttttattgtagtatcctacaaggttacttttagaggttatttctttgtagtcttctggtaacactacctgtacatcatagtttgatgctgtaattgagctgtaatactgtttttcataatatacaatatcacataacctgtaagttattaatgaaaggcatacaaataggaatattaggatatataagaaagtggattgcttcatgttgaaaggattaaaattttagtttgttaagatttgctgaaaatttgtaatgaggtatcattaacaatccaaataccccaaaagataaaggaatgcagatgatactaagaatgattgtgcttgtcctgcttctactcttgaatttcttaaaagtttgggcatcaattgtcccttgactgaatagtagataccttttatatagtcttctaataggattaaacagtaatgtaaatattgatatatagaggccaaaggttatcaaccctcctaatattgtgcctacaaggtaagcagtatcagttaaatcataattgcttctattgttaatggtatagaccattgtgatgaacattaaaaacgtaaaggtcatgatataaaggaaaagattagacttttcagacatctttccatatttatcaaggttggtactaatctgttcatcaatagctaaagtaggattatcacttcctatagagttgatgttgctgttggagattattttattctcttggtttcttgatttgatgattaggtaaataatcaaggttggcacacctagtataatgaacacaattataaggtgttgaaagctcaatgctaaggttgttgtcataggtttaagttatttaatgtgataacaaatatatcaaagttatcgagaacgataaccacgtgaaggctatttattttcacttttggttattaatcatggataagaaagaactccaaatagcaatcagtaaaagaattatacagttgagagaagaaaagaaaatctctcaatctgaacttggagctttgtgtaatatggaaaaatctaatatgagcagaattgagtctggaaaaaccagccctgccctctttaccctttatacaatagcaacaaagttggagatagatttttcagagctatttatcttctctgaaaagcttggtgaaaaatctactaaataaaaactccctcacttttaatcatcattgtactaagaagctgtaagttaatgctatcagttcacagggttacctgggtaggtgtgaaattacattcattgagaatgacaatacactgaattacttttaaaagaatttcaatctcactcaatttcagctatttaataaaatttcacccagtcattaattactttttacagccaaagttacctgggtaagagaaaggtaagcatctgtaaactgtaaacagaaaaaataaagtaaaagaaaaaggacaaaatttactccctttctttatatcctccaggtaaattctgtccttgaataagtcccagtttttgtataatgtatatatacagaaacaaaaagtgggacttttgaatatttttactggattgcagactgtgcatagttacctggggcagtaatattctctcctgaattatacaaattatcttcatcaggtgtgtactcatacctgtgatgtagagtgataatctctcctgtatctttgatagtgtactgataaggttcacattcaactttaataatgttgcctttcatcattgtacctctaagacttctgcatacagcttcatcaaaggttgcaggtatatagcacttcttggcagtggcataatactgccctgtggtctgactttgtaaaagttcaataccactgttgatttcaagtacacaaaaacttgtaccatcttctttctttctttttaagtaattcgtaatcgttaccatagtctttttgattttgagttaattgttaattattaaaacaagacacaaacctttatacctccactattacctggggtctaaaggcttaatgtctgttgcctccccataagtgggggttattcaggagtgttgcattgtaaaaaagagagatagacactattctttacctacccaggttcagtagtgagtgagatgaatagaaatcagtatagggaggtgcagtgaaagcacattcacaagaaaacatagtgctattaaaaataaaaagttcaaattgaagtgacagatgttcactcaaataataatacacctgtgaaaattttcgagttcctgtaaggtggggggagggattttcccaaatttaaagagaggtgggggctgtatcagggcattcagaaaagtaaacttatggagaaagattttttttcagaaaaaaatcttattttagaatataaatatttaaacaccaatgtctaataaaaaacatttttctaagtcatttgatgatggtactaaagctaaattagaattattcagagattatttaacagaatggcttccagtttttatatcctcatatgaaacaacacattgggagaatatttttatatatgacttttttgcaggggaaggcaaggatatagatgaaaatttaggtagcccattaataattttagatgtcctaaattcatatgaagatttagtaaaaaaaacaaaagttaagattaatgtagttctaaatgaaatggataaaaaaagacatgaagtcttaacaaaaaatataaattcattttcatataatagagaaaaaatatctgttgaaatttataatgagccttttcaggagttatttaatagactttatcctattatgttacaatcaacacaattaccaagattaatgtttttagatcagtttggtattaaggaaataactaatgaaatctttgggaaattaataagctttaaacgtacagatttcatattttttatatcatcatcctttgtaagaagatttaatgaactcccagaattcacaaattatttaaaaattaaaaaagaaagtttcgaagaaagtaaaccctttcattctcatagagtaatttttaattactacaaatctttaattacaacagattatagacttgcaccattctcaataaaaaaagggaaaaatatatatggactgatttttggttcaaatcatactttaggacttgagaaatttctaaaagttgcatggaaaattaatcctcacacaggtgatgccaattataatatagacgaagaaaaaataattgatgggcaactttcattatgggaagaagataataccataaagaagattggattattacataataaattaaaggagtatgccttaaagcatacatctttggatttatatgacttatatattaagacgttagaatttggctgccagccaaaacactgtaatgacttattaaaagtgcttgaaaaagagaaaaaaatagcacctgtaaaagtgagaacagaaaaaatacataccttagcaacatcaaaaattttagtaaaattactatgaaaccctcaaagatagaatggacagatgctacttggaacccttccacaggctgtaataaggttacatctggctgtaagcattgttatgcagaagtaatggcaaaaagacttcaggctatgggtacacctggttatgaaaatggatttgagtttactttgatgcctgatagattagagttacctaagaaaacaaaaaaaccaactaaattttttgtaaattccatgagtgatttatttcacgaaaaaatgccattcgaatatttggatatggtttttgatgtaataaaagaaactcctcaacatcaatatcaaatcctcacaaaaagagaaaatatattagctcaatattttaaaaataaggaggtacctcaaaatgtttggttgggagttactgtagaacatttaaagacaaaaaataggattgatattttaagaagtattgatgcagaaattagatttttgtctatagaaccattaattggtgagatgggagaacttgatttgaccaatattcattgggttattgtaggtggagaaagtggtcataaagcaagaccaatgaaaccagaatgggcaattgatatacaaagacaatgtgatgaacaaaatgttgcttttttctttaagcagtggggtacttggggtgaggatggagtaaaaaggagtaagaaagcaaatggtaggattttattaggtcaagaatggaatgaagaaccagagtatgaaatagaattttgattatagaatacttttctaaataaatttaaaccttccagttaaaagaaagatttgcattcttcttaattaccatgaaacacatcacaagaaaatttttatttcaagaaaagactttaccaacacctaaagaccctaacaagaaggctgaagatttaatacactctgtagataggagagataataagaccttgaaaagcaagaaaaatatgtcagcttttatgaaaactgtggaaggagattacttgctgggctttattcataattacaatggtacacatgccatagttcctcttcctgatttcacattaatccattttgactttgcccataattgtaacagggaaagaaaggcacaggaaaaagaactctttgcaaaactgattgcccctgaacttgagattactgatgatgtaactaatgagatttatgcttattatggatatgcaagtagtacaataatatccttatttacctctattgagagttttgtaaatcatattatcccctctgataaaccatttgtgaaagaattaaacaacaaaacagagctatataacaaggcacagatacaggaagtattaccattttgggataagctaaaaactgtcctcccatattattttggtgaaaatttctttttaaatcctacacctactaatcagcatattactaaccttaagaacttaagggatgagattatacacactaagtcagagagtgattactcaaaacaacaggctttatttaagagtgtcctgagtttcaaatatgaccagacctttgaagctgtagccaagttcatgaacttctataagcctgagtacattacagagtgtagttgtggggctgatttctgataacgcataaacaaaaaccattctctactatatagttcaagaatggtttttgtttggaaatattaagttagttattcttctataggaaaaacttgtcttacaaacttaagaagttcttcaatggttttaaactctttttccacagggatttgaccaatagcataatcaattatgattaaatcttttcttatctcaacgccaaaagtgtttttcatcattttacactttaatatatcgctatacccatcttcctgacctgcaattaataatccatctttggaaagcataactaaatagccttctgtttcaagttctgattttatttcttgaatattcataatatttaaattttattaatttatctagcttgtgcccaatgatatttactccctctccaaaaatattcaaaatcatccaaagacattgtagcttcaactccatttttctgtccaaatccttttactttatcccaagggtctctgatataaactattccatcttcaatcttatctactataatagtatgtcgtgttcctcctggaggttttaatgttgcaatccaaggtcttttagtaacttgtgaaataacagaagctgtttccttcatatcatcgattcctatataagcacttccagaatcaacttttttgcctttaaatatttcttccattgctcctttgatattctctaaaaatgttccagtattaacatcagtattggctaatttcctaactgcactttcaggaacatcaatcccattgtctttggctaattgtctgatacaagctgctgcacaagacattggttcttcctgacaaaaaatcttggatgaactaatttcagataaatatttaaaagctcctccagtcccagtacctagtctaggtttcagaattttgctccaaaaagcattgatctctttaaaatctcctttaaaaatgggtttttctttccatttcagaagataaccatcaacctttgctacaatctcaataccaagcttttgaaatccaattcttgcactggcaagaatattgaaaatgctctgtgctttctttccttttattacaacttcttcaatctcttctgctgtcatggctaaatcctctgccttagctccattcttagccccttgcaagagttcttcaataaacttaatgaaacctttaaaacctttaacacaagcttttccaaatctaaagataagctttccaagaccaagtaacaaatctgtaattccaaatgttactgctgaaaatgtttctctggttagaacccaaagcagactggatgccttctgtatataagtagttccttttatgatatttccttctcctgctgtgaagataagaagtaaaatattgataatgaactcaaaggcaataactcctgtataaaatgcaactgtataacgagaagcattgtcccaatatcctttcaacttgtcaaatataccctcaaagtcagactgagatatttctccactagaactgaaaaggtctttaactccttttaaaaatactggaccatttgcaagaatccagtctaatacatcttctgctttctctaataaatcccttctatctttatactgttcataagataaagccattgttggctggaaaagagcctgtaatatgtataagatacattgtaaaagccccacaagaccactgtttataccacagtaaaaagcattggcaattttaagaacttcaattcctgtctttgccaactcaaccaattcatccttaacctcagaaagaaaatttttaattgtattaatgacactggtaatcttttctacaagtcctttgaaggcatcaggaagatgttcaatagaagcatccttaaccatacttgctgcctgttttactaattgccaaacttgagtaaaagcaacttctgcaccttgaacaaaaggattgttgcccagattttcaaagaactgtgctgctttattcatgttgatgggtataggaactacagctccaccaattacaatgggaactagaggagaataatctttagcttctggattgtaattcttttcagtaggtttgaaatcttccaagtgttctgcacaccacccaaaagcatcagcaggaatggaagcaatattacctataatttcttcaaacctcctgtcaccagtataatactgatattctctcattaatgcatcacgagtaagagtggcattaatcttatctccttcataagtataagctaactgtgccaaatatgcagcttcatcttccatagaggtaatattcttaaagaatttcccaccaacactggaaggtaatggttcaggaaatctcttaaaaagctgaacaaaataatctcccatcttagcaatgtaaaagtcacctgcaaagttggatttcttagaattaggtttttcatagaaaagaaaaagactttggggttctcttttgttggcattgtaacttcccaatacctgagaaccattttcacagggtaatacctgagcttgatactcgtatcctttcactcctttatcatttattccagtagatgggaaaatagatacagggttatctgtgagataagaatgacccaaaggagtatttctgtaatcatgaaatgggcttctgtaatcaggagaatcatctttgctgataattttgtttccaaaagcattgtttcctgcaaatccttgattaacttcttcaaaagagagtattttgaactgagataagtcaccaaattcatcatcaaattcttccataagctgtgttttagtaaattaatattttgtttaaatgtttctaaagcaaagctaaatcttgactgcgccaaaacttgacgtgtttaaaattccttttaatttttttcagcttttatttgactacctgtcaatgaataaaaatccaccccacaaaatgcagggtggaaataactaactcaaaaaccaatggtacttactgttaccattgagtgttttctgaatgccttttgaaaactcaaaagcattcaaatttctatccaagaaagtatctatataactgctcttattagcctgtgtaaagagattgtacacattccaaaggttaatatctccatcatcattcctgcaaaagctttcatcttcatagtaatctttagctactgtattaagctgactgtcattgaagtttaggtttggaatcactaatttctcctttttaggtaaatgttgatacagccttgacctgcccaaaagctgggcaaattgatgctctgtaagataactgtgagacaatgacttcatgacccccaggtgactttctgccctgtaattctgaataacattagtcactttctcctgtaattcatgataatttcccactctcatttcctctacaaagccatcagaacttacacagagattacaacatactttgttttgaaacccaatgaaaaacttgaacttttcaaaagttttcttgttgtagaggttctccaagttataacttcttaccccacctaaagtcaaagccagttcattaccattaacagtatctacaatagaaggtatctgaatgataaaagccattctttcataataaatagtcttttcatggtctaataaatcctttgcacttttgtagatggcatcaggagttctacctttgatttggtgtgataccctgatttcagggttacttatactatgatgaggaaacagtttcataactgtattaataacaatttctataaattcttggtgggcaatggtcttttcattgtccttactaaacacaggaataatgcagtcacttttaaggtggcttaaatcaacctgcaaggtgttggcttcaatgaatggtttgtgaacataggttgtattgttggtgctgatagtatttgaaaccaaaagaggctgaacacttcttggttcaacctccttaatttcattcattctacttggataaaatacctctgcatcttggatatctacagttcccaggttaaggtggcttcttctttgaacattatgcagttccattactgctgtattatctgtgtactccattagttgaaaagttttgaggattagacaatttgattaaaaatgattttctggcttcatattcaggttttaattcctcctgataatcaggatattgtttgtaaagtgctaatagttcagccacagtattacattctcctattttactaattagattgttaatttcattagagcccaaatagctttgtgcagaagttgcaatagttgcagtttctgcaattcctgcattacaccagtcaagaatcattttaccagtttgagaagttatcagaaattcaggtttattcatgaatagtcctgttctgtccttacttgctttagctaagtgattatcattcactaactcaaaattgatagttagttcatattcaaagccatctctagtgatttctttagtcccatgttttacaactttagtcttaccattgataccaatatctaaagagtaatccatctttcttcttgtggtggtaatgatatgacagcttgactgtaaaattttgttgatgaatgcttgatgccttggagttacattagcccaatcctgaaacctgccacctaatttctcatgaatttctaagcatccaccagagccattccattcatgactggctgaatctatgataataacttctattcctgatttctcacacagttcaatggcttgtatatacctttcaggagcataaggtgcttgtaagtccagaacattgtagtttcctaagtcagaatacaaggaagcagatgagttttctgtgtctatgacagctattttactccagtcctgtgtcattccataggctaataatagtgctgatttggtctttccaaatccacttgcaccagatagccctaatctgagttttacttgttgtctttgtgattgttttaattgcatagtgattaatttaaaaggttaatattttctttaagttatattcagttaaaaattaaaaaaggttaatctcaaattgaaactaacctttggactaaatatttaatagtgttctgttggcttcatccaattcttcattatcaaactctttcagatatgtcatagttatttgcacattggaatgtcccatcaattcagaaattaaatctgtgcttgttcctttctttttaaggatggttgcaaagctgtgtcttgccacataagaggttatgtgagcttcaatacctgcaatctttgctatttctcccaatttcctgttataacgtcctagaactttatgctttctgtgttcaatctgcttaggtgtcatattatcattcagtagtattggaaaaacataagaagtatttttggtcttgtctatatagaaatcaataattttctgtgctgtatcaacaacttctatactaaatttacctttggttttggctctagtgtagtatattctaccatttactatatctgattttttaaggtacatcatatccacaaaattcatccctcttgtgtaaaatgagaacataaagtaattgtatgcttccataagatgaggaaactgtgataaatcaacgtctttcaacttcttaaaatcatcaactgttaatgctcttttgttgggttttgctttaagcttggaaattttgtagtatttaaaaggataaatgtcttgggagataattttcctattaatagccttattaaatactgctcttatctgtctcatcttaaaagccattcctccattgtcatttcctcgtgaacgcatatagacttcatacttttcgagaaattctggggtaagttctttaaacttaaggtttgtattttcagcataactcagcataaattttgttaaagattctttggcttccttgtaggctcttgcatttcctagtctgttagactgctccaattcttcaataatctcattagtaaagtcaaaaaaattttcattagtatctggaatacccctgaacttttgctcaaattcatttaacgtaaaatcttcatcatttatctgaaaatttctgatgatactaaaagcatgttgcttaagttttaaaataagttcattttctattctcagattaggatgtggtttcacaaactgttcatttataaagtgtttcctaaagcctttcaaactcaaggaaatctccttttttttcctattttttgtaatgcgtaagtaaaccagatgctgaccatcagacaaaggtttattacccatgacaacttttatggttgcgtggttattcattgttgtaaaaaaatatagttaaaatacccttccaataaacaggaagggtttatttgttaaagtttttggtatacaccatttttaagctttttgataattttattaactctccacttttttaacttgtagtgtattgttctgttaccaagacctaattttttacaagccatataaatatcatttgttgaaaattgttcagaaagtaaacccagtaattcttcatcattttctgataatccaaattgttcaatattcttaaaattactgagtgagtgcttgtaataaacccccatcaattttaagcaaataagaaaatcttgattactacaaatgagcattgttcctttagataagaattcaaagttcccagactgtctataaacagataaaatcatacaaattctaaagaatatcaatccaagcctatgtatgttagaaataaaacctaaagattcattttcattagttaagatattatgatgtttacttgtaaaatattttaggaagatttgttgttggcgttgtgttaattcaaactcaatatcgctatctctgctttttaaaacttcatagatttgatgtactttatctgctgctgcttccaagattttattaatactatcacttctcttttcaaagacattcttaaaatcactaacctcatcaaaacagtacactataaatcttgacaataacccattttccttagaatttattattgatttgagttgagcaggtgtaccacttaaaacaattgataattttgggttttgaacaaaaatataacgaccatcactttttctactcatagaaactggctcatggtgaaagcttttacgaagtacatcagaataattcccccaatcattccctaacatatttcccatagtatcagcttctgattcaataattaacacactgtcttttgctctgttcatcgcattatacaactctgagctactgatgtttgcaggaattatttttagaacaggactattatctaccttttctttatcgtcatcatttttcttatcatcgctctcaggcttattccacccatttatactatctgctaaaaccttagcatgtgtcttttcagctaatactctggctttcattacaacaccctttcctgaagcaggtggagcacttataatcgaaaacagattaggataagttacacttgagtcataataaccaaaaacatttggaattaaactacttaatacacctaaagatgatgtcaaaactatatctctttctctacctgaaaaattatcagttactattttaaggatatctggcaaatttttgtatactttatcaggtatcaatggattattaatgtttttttccacttttcttcatcttttcaattatactttcttctaaactcgtaatagacttcatctcattctgcatcatccagttctccaaatcttcttttctaaagtagattttaccattattaggtttgaagaagttaattctgccttctgatgtcaatttatacaagaatgacttgctgacgtccatgaatgaaacagcttccttgaagcttaaaatctttttttcaacgttttccattgcagttagatttttcaattatgacagcaaatgtaaaaacatgaaaaacaccctgtagacaaggtgtaagagagtgtaagatgtgctgtaagaaaagtgtaagattatttatttgttaaagccagtgaatcaacaaattgaagaatattttccaacacttttttttcttctggttttttcttcaatctcgtagttgaagtatagtagttttcagaggttataaatacttcatcattctttgtcatgaactttttactatctgcaatactttgtatattcatattacgaaataatctggatattatctctaaatatcctaccattacaggagtggaggttttaaatttaatatgagatgttgaatcttcttttgtcagaacttcaataaatgtgctcatatctgtatcgaaaataccagaattgacagataaacgatatagcttttttaagttgggtagagtactcttaaatccaaaggtgctatttggggtaaactttctagtttgcttcaaggctattgttattgaatatcttctaaatgcatattgttggaagtctttaaaacttatttttatctctggatagtcgttgagaaaattttggtaagtagtagctatgtatctaaaagaactttcagcatattttgaaagcttaggaatatttattgttgacgtagaaagaatagttgtatcaaaattgtccctagcatggttgaatactttgtaatactcacctaaaatatggctttttaatggaaaaaactcgtcattcttccaaacaccttcatttagaaacagacagttacctgggacacctcctatctcattaagaaactcttcatagaacttatttttgagtgtctccaaatttgattttataaagaaatcttctaaaggtttaagaaatagattcatatttcaaaaatatgaaatgtttcacctatgtttcacctgacaaaataaaaaaccacctacatttttgtaagtggttgattttgagagtggtcccacctgggctcgaaccagggaccacctgattatgagatatatttttataaccatactttattttataatactatattttttatttataatacacatttacagcaacttatttattttataattttatattattatatattttcttacatttgaatcaagtatgttcgtcaaatgttcgtcaaaatattatggttagttttcaatttacattaaaaagcagtacgaaggtcaatggtgaaagaagtattatcatctcttttatcaaagacagaaaaaatacatctctttctcttcaaaagtcttgtaatgaaaaccagtggagctatgagacagaaagagtgaaaaagaatcatccagaacataaaaaaattaatgcttttatagaaaagtaccacaatataatagaagaaataatcgagcaatttgaagatgataatattccctataccctacccgatcttataaatagaattaaaacatacaaggggaaaaatagaactgtgtcttacacagagttccaactacaaaatattgaaaatctaaagaaatcatcaaaaattggaacagctcaaatagaaaaagaaactttgaaatctcttcagctattcttcaaaaagaaagatattggatttaatgagattacttatttatccctaaaaaaatatgaagcttattgtatggaaaaagggaataaatctagcaccataggaatacgcttaagaacattacgaaatatctttaatcaggcaattaaaggaaaaataataaaagaaactcagtatcctttcaaagacttcaaactttccaaaattaaagatgggggtaaaaaagaatttttaacaaaagaagaaattgcgtctcttgttagctatgaagctaaaaactctaaagaacagtttgctaaagatatgttcttattcagctattattctcgtggaataaattttatagatttacttaaacttgaaaaaaaatctctatcagggaatactattaactatatacgaacaaaaaccggggcctctgtcaatttcaagttgatggataagaataggagtattattgataagtattattcagaacctgaatcccacttcattttcggaattatcaaaaataataacactgatgttatatatttaaaaaacaaatgccataagtatttaaaagaatttataaataagccattaaaggatattattgaaagcctcaaaatcaataaaaacattacttattattgcgcaaggcactctttcgccactgctttaaaatttgaaaatgtttctattgatataattaaagaggcattggggcataaagacatcaattcaacaatgtcctatcttaacactttaccggatactaaacttgacaaaatcattgaagatataattatataaacacagaatattctaaaagacatttactaatacttttgatccaaggaaacattaaataagtattggtaatgagattcagaattacacaaatattatcaacttcatagcttataaatttctagcatttgaaatctaaaagttgagcaaatcaaaaattgagatagtatcctattggaaaaatacgtaattttgctataatggcaaaagctgaatacataatatctttaatcaaatcgcattacaacaacgagccggaaaggtttacaactgttgctttgcaaatagctgcccacgaagctaaactgggtcataccattgtagctgatgaaataaaaactattattgacaaagcaaaggaaacaaagcaaagaaataaagttttttcacctgatttacaaggcctgatacaagaaaatgtgcctgccgtcaatctttccgatatgattgcaccacaagatattaaatctaaaataaatcgcattatttcagaatttgtccaaagagacaaacttcgtaaacacgatttagaaaaccgtagaaaaattttactttcaggtcctccaggaacaggtaaaactttaacggcatctattcttgctaatgagttaaatctcccactttatactattttgatggataaaatggtaacaaaatttatgggagaaaccagtgccaaacttcgccaaatatttgatttaattgaacaacgtcaaggtgtatttctatttgatgaatttgacgctatcggtggcgaacgaagtcgggataatgacgtgggagaaatgagaagagttctaaactcttttctccaatttattgaaagagacaattccgatagtctaataattgccattaccaataataaagaactattagaccaggctctcttccgtagatttgatgatgtaattttatataatcttccaaacttggaagaaaaagaagaattgttaaaaaataggcttgctcagttcagtaaaaaaatcaaattcaaggatttgttaccagacataaatggcttaagtcacgctgaaatatctcttgcctgcattgatgctattaaagaaacggttttgaatgaaaagcagccgatgaataatcagttaatcttaaaggcaattaaagaccgtaatgcagcctatcataaataattttgggaatggcatcatacaaacacatcttcatatcaggaaatgtaagtagcgaaaaatataaaacccgaggtgttccaattgcacctaagccatttcctgttcgtgatagagcatcacacagtcaaaaattgttacaagaatttgagcaaatttggcgacaaaaggaacaaatacaagaacagagaagtgctcagcatatcgccacaagagaaggaacgtatattcagtttaccagtgctacagaccacgatttgattactaaaagcttagaagacctaagaaaaggtattcggttattgaatgtcaaagaaatttccattggcgaagaaatacaagtaagagcaacagtgtacgttccaaatggcaaggaaggacattttattactaagattcaaaaataccaacaggaggaaactgaaaagggacagcctaaaaatgcgccactggtaaatagcattgaagatgtaagtatagcactattagaaggtttatggacagataatccacaactaattccggcggatacagcaaagtggtgtgaagcgtggctgaatgtagacaccaaagaaaaccaagagcagaggcaaattgcagaatttcttacaacacttcaaaatattggaattgaagtaaagcataatagcattatttttcctgaaagagcagttttgttgataaacgccaatcgacaacagttgattgagttaatgttacaaagtgatgtattagcagagtttcgtataggacaggaaccagcaggattttgggtaagggaaagtcgtattgaacaacaggcttgggtcgatgatttactacgtagaacccacattatagaaagcaatgttaaagtatgtattttagatacaggtgtaaataatgggcatcaactattgcagccgcttattgatgataccaatactttgacagtcgatagtacttggggaacaaacgaccacgcaaacgggtccggacacggaacactaatggctgggcttgctggttacggacaaatggagcaaatacttatttcccaaaatgaagtttcgctaacacataaattatgctctgtgaagattttacccaatcagggcgaaaatccacgagaattatggggtgatgtaacagcacaaggaatcgcaagagcagaaatccaaaatccgaatatggttttggtttattgtatggcggttacatcatcagaagatacctatagaggaagaccttcttcgtggtccggagcagtggataatttggcttatggcgaaggtgaaaatcagcgattaataattatttccgcaggaaatgtaaatgatgatgaatcgtggcaaaattatcctaattcaaactttacatcctctgtccaaaatcccgctcaagcgtggaacgctttggtcgctggagcttatactgataaaatacaagtcactgattcaaattttcaaaatcatacacctattgccaacgagggacaaatttctccttatagctgtacgtccttagtttgggaaagaaaatgggcggtaaaacctgatgtcgtttttgaaggcggaaacctgttgaaagcaaccgataataatgttacaggacacgaagatttagaattactgtcaacctcaaaacaatttacaactagacggcattttgatactatttgggcaacaagtgccgcagctgcacaggcatcttggttcgctgcaaaagttgcttacgaatatccaaccgcttgggcagaaacgataagaggtttaataattcatgctgctagttggagtgaagcgatgtataatcagcacgaaaaacaaaataataaaagagatattacaaatttactgcgaacttttggatttggtattccaaatttagaccgggcactgtatagtcaggaaagtgctttaacatacattgcacaggaaactattcaaccattcaaattcaaagaaaacagtaatactcctgaaactaatgaaattcactttttcaatttaccttgggcaagcgaattgttgttagaaatgggtgaaatacctgtaaaaatgaaaattacactttcatattttatagagcctggtgcaggagaaattggttggaaagacaaatatcgttatcagtcacacggtttacgttttgatgttaacaatgttggtgacagtgaggaagattttagaaaacgagtaaatattgcagcaagagaagaaaacgaggaaataaacggaaactccggtagcaatagatgggcaattggcactaataacagaagcagtggttctatccattccgactatatggaattgacagcagccgaattggcaacttgcaatcacattgctgtttatcctatcattggttggtggcgcgaaagaaagcatttaggaaaagtagaaaccaaaacacgttattcgttaattatttcattggagacacctgcacaggacatcgaactgtacacgactgttaaaaatatgattgaaatccctattgaaattgaagctcagtagaaaaataattaatattcaacttttataataattacttttccgcatattcattaacaatctattgaattctgtttatccttgtatttctttacggattcgtaatcattagagactttatacaaatcaatcaaaaactgatacatcgcaacgatgtggttatttcttatttcttgtgtttctaaaatttcaacgcacttttgctgatgaataatagcatccccaagattatttttcagtaaggaatattcagaaagtttattataataactggaaagcaaaaaatcattccttcttccaataggaattaaattatgatatcgaattgcttctttaattagagcttcggatttgtcaaaatttttagaggttcggtaaagttctgatagtatggtataaccaactccgatttgcgcatcattataaaaataatatttttttcggagagcagatactttattaaaacatttaatagcactatcaacatcactttttacgaggtatgcctgtgcgagattattaagtgttgttataaacatcaataagtctccatctttatagctgccagcatttttaaagtatattttaacagctttatttagatagacaataatttcatcaattgctttttcaggttttaaacttaatgctagattgttatacatagctgccaaaggaacatcttcctttcctagataactttcgcttcttttaatcaaatctttccaaagttctacattatttccacgaataaagaaaaaagctgacagatgaagatattcattttccaacatcaaaagaggttgataaacgctatgacgatattcttctttaattgcattcagaatggattcggcatattttagaaatctaaacgactttctgggattattatatccatccgacagtctaccagacaaccacgctatatattgaaatgaaagtatgaaaggatttttttcttctcttgctgagtacaaaacagaatcttgcaggattttatgaattcggatactttttttaccgttttcaaattgcacaagacctttcttttctaaagaatttatccagttaataaaatgagttttattcccatcataaaatttttcaccacaaattaatattagatcttcaatgatgatgctagatgagggcaacaaacaaagatactctaaaaaatatttttcattactttccagctcctcgatcgaaaatttttgcaggataaagtcaaaaatttgaatcgatttattttcttcttcagaaagctcaatatcaatttttaatgactgattatttagattttgtttttttaaagaatccaaaacaaattccagtgttaaatcaaagctattttcgatagttttagcaactaattcaataataagattgttataatcaatatattcaaaaaattctttataagtattatcatctatactctcttgtgagtagtgtaatagaaaaagcgcctttgcttcttcataacctaaatgaggaagcaaaaatggattataagatttaaatctattacgcgcgatgattatttttttccagtttcttaagcttgaaattttatttaaatcctcaatattttctgcgcctttctgaatatccagtacaatgagattattgtcgccatacttttctaactcattgagaattaaatcgaattgctgttcaatggtatgttctttatctaagtaaatatgaagattggaaattaagaggtcatttaaaacaaatgcgctatgcagagatttttcaatggtcagccaaataacgttgttaaagttatgtcggtgattagataagagtttttttacaaaagtagttttaccaatacctccaaaattatgtaatgaaactatatttttttgatttagaatgttaaaaacttcttcaatttcattgttccagccgataatatcatctacattattaatgtaaggaattagagtaaggtcagtttctactaaatgacgcggtttcagcttttttatttctgacgtttgtttttcctgtatagtttcgatattcttaattctatccttcaattcttctatctctactccgattaaattgataaatttagaatcaattctattctgaatatcaacatcagtaagttctaatagttttcgtaaatcagaattggtaatacatcttttagacttttctgtttcttgtgagcatctattaatttcagaaagcaaaactctaaagatgatttccgcagatctacccttgaatgatttatcttttagtaatgtaaaaatttcaagttttaacttgtcaatagcctctttggtagttagttcaccaaattcccacctaatgcttctgcaaaaatcttcaatgagcaactcatccaacaaaatagaacaaaaagatttatagctattatttatttcttgtttgcgatatgccgcaagattttgacggttaagttttgattgtctgattttattggattcgcttttaagtatatcgacattctttttctttaaaagttccaagtctttgtaattatcgaaaacatctctattaagccatttacctaatagcttttcatttttctttatgctggtgttggttataaatgaaaagacaggatagacattatcttgtctatattttaaatatgtgataaaaaaatcaaaaatagaacttttaatctcttttgaatttaagctaaagtccgaagaatagcattttaattgagtaaaaacatatttttctcccacttccttaatatcattttcaacttcagtatagattgggttatcaatattgtttataaaatttgttacccaatttctcaaaatagacaggtattgatagtaaaatcctctattagtaaatattgcttcagtatttcttttgaaaatttttatcgagtttaaatcaatttcaatcatctttatttgataacagtcttaaggttttattatttattgagtttaggtttatgaacaacgaaaaatcattttttccttttataatatacagcttccaaatattcgtaacataagattcatattttagttttagtcttaaaaatagctctattctaatttttgtttaaactcaataaataaattgagtaattcgttttgtttataaatataataatcgatttccttatattctctttctatacttatttcatcactaaactcatcggattctaaattgattaaatattcatatcttttattgagcttttccaagttagaagataaaaaacgtataaaatgacaaatgaaatctctactagtgataaactttatttcggtatcattattaatatacagcaggtaattctctttactagtttcaagattaatcatcttatatatatgattaaactctaccccactgtcttttagctgttttccaaatttcaactttaaaatcttagataaaactgcatacgtgctttctgtcttttttagcatcttttatgaatatgataatttcataaacttacgatttttctattattaataataattttctgagagcaaaaaacagtacttatctaaacaaaaaataccaactattgtcaatattctattcaatctattaatttaaaaatttgtttaagaagcaatttcttactacaatttaaaatcaaataattcctgtggatgcacatctagcccttttgctaactcttgaattgtagagattctaagatctacttcccctttttcgattttgataatattactataatctacatcacatttttgagccagctctctataactcatatagctttttccgaaacatctccactctcttgccaaacgctattctaaattctaatttatccattgcggataactttgaatagacaaattgatgagatttaaataaatttttgtagttgaattaacctacactagaaaacgggtaatttgtatgttacgggaagataagtaaattagctcacgaatgcggcgtggactcttttatcgtacacgggtataccagtgcctctagtctctaagctgagttccacgccttttctttaggcaagatgtagcgagttccatttgatatagagaattcatctttagtgatcgaagcagttccttccagtaataatttggctaaatacactgcttatgaaaagaacaaactctctgccccgaatgctcaatgatcataagttatatgaactgctgaaaaaaggcaattccaattcattagatcatattcatttacggtacaaaagagttctctctggataggaaaataaatccttgaggatgattttgtcgtggaaacgctagtacagtatacatttcttaaactctggctacaccgtgattccattttgaaactcctgcccatattcttggctttttacggttcgttctgaagcgagattgtataacatatttcaatactccgaaaaataaatttgcacgcttatgcaatagacaatatgggtatttcaacttttgggaagaaattcatttaattatagtactatcaattttcatccacttgaaattattttcacttcagaaagaaaaaattacactgtatgaaaagactttgatagaaaagatgatgatggataggttagaaaaacttatcaataaataaaatataagtaatttggggaattacttttaatagggaaggttcatccaaattggttgagcccgcttaattgtaatagccaccatttaatctgatagttagggtttaaaatttatgttaacagaaaatatctcagcatttttttatttgtaatttattttatgatttaattctattgggttattttcttgtaaaatatttttttgcatttctttagtctttactgaaatatccattgcaataccattcgggccggtaaatgtaactgtttttcccatcgccaattttggatttatatcgtaaggatcattaaaatatgattttgcaagtgtttcatatttttcccaatcaatttttactggttttgtgcgtgcgtcaaatagattccctccttttttgacctctatcaaattaaacgaatattcattgtttgaatcttgaatagaaacaatcagtccgggtaaaccactgaaaacatatggaccatcgctgaaaggtaattccgtagtaaaccaggcaatccagtttcttcctccataatttgcttcggctttttgagacttatattttccaatcattttttgttcggaacttattttccaatttaatacttcctcaatgggaagtagataatcagttcccaaataagttattactttttcaatttttttttgagttagattctttttgacatagaattggttttcaacacccattttataccttccgtttccattatttaactttattgaatcagattgtttgtcttgtaaatctctaaaaattgaagcattattttttaaatccaaaatcatattgtcggaattaatatcgtctggtctttctgaatccagtttatattttgcttcataaataaaactaaatttttgtgagaagcaaaacgtagaaattccaagaaaaaaaagtaaaaatttcatttgtaaaaggtttttgtttaaaatttgtgataatgctaaatagcttagcattttttttatttgtagtttattttataatttaactcaattggattattttcttgcaaaatataattttgcagttctttgttctttacaaaaatatccactgtattaccattcgcgtcggtaaatgtagccgttttccacccccttgaatttatattaaacgggtcattaaaatatgattttgcaagcgcttcatattttgtccaatcaatttttattgtttttgtgcgtgcatcaaatagattcccgccttttttgacctctatcaaattaaatgaatattcattgtttgaatcttgaatagaaacaatcaatccgggtaaaccactgaaaacatatggaccatcgctgaaaggtaattctgtagtaaaccaggcaatccagtttcttcctccgtacgtagtttctgctttttgagatttatattttccaatcattttttgttcggaagtaattttccaatttaatatttcctcaatgggaagaagataatctctttccaaataagttattactttttcaattcttttttgagcaagattctttttgacatagaattgattttgcacacccattttaaaacttttacttacgttattcaacctcattgaatctgattttctttctagtgaatctctaaaaattgaagtattattttttaaatccaaaatcatattaccggaattaacatcatatggtttttctgaattcagtttgtattttgtttcgtaaataaaactaaatttttgtgagaagcaaaacgtagaaattccaagaaaaaatagtataaatttcatttgtaaaaggtctctgtttaaaatttgtgctaacggcaaaaatattagcgaagtgctggctaatgggactgaaagttcaactaaaactgaacgaagcaagcactttttttctgataaaaaaaatagaaaagtatttgcatataaaattttcaaaacttttaacttcatcattttgccaatacatctataacaggagcggtattttttatatagattagtttctcaagtccataattattaactcttaaagtaggaaaattaagtttaaagcttggtatattttctgatgattgtttcatatctgatgtcctaaaagttgcctaatttgatagaaaaacctttcaattagtcttaaatctttggtaactatttcagcattccctttcaattctttgtcaaatggaagtgtcttattatatgaagtttttaaacctttaggaaggataacatctacataataattgcccttatcatccggtgttaatgatatattttgaaccctaccttctacaattccaaattcctggtagcggtaattatccaattttattaaaactttttcacctgtagtaactttgccagagttggttgcaggaacggacattctacccactaaagcaactttgtctttaggcagaattgaaagaattgcatccccagatttaacaaattgattttcgccgaagaattgttgaaaacttaccgttccgtttgtggatgacactattaaaaagttctgctcccactgctttaaagattttcttaattgctcaaataattgcagggtctgggatgaataagtgattttatctttttctgtattaatcgccgttccgctttttgttttattgagattggatatactttcctgcatttgagacaaagaaatatttatgttctctaagttttgctgagcctgaagatattttagtttttcaccttccaactccaccgctgcgataactccttggttaaacaattcttgtgaacgtttgtaattctttagagtaagttcggtttttgcaacttcaagatttctctgctgtcttaaattagtgattctacttttagattctgaaataccttgattggctgctagattttccggagcataaggttgtagtcttgtaaataaattttcatcctgaaacgcttttgcaaaactattataatcactctgcaattcacctagtttataatgagaaacttcagttacaggaaacgaaagtaactgatctgaagctatagaatctactattttttttaattttaaaacatcttcataacgcgctgtagattgcaaaactaacatcacatcacctttctttacgttctgatgatctttgataaatattttttcaattttcgaactacttctcgcctccattttctcaggtggattttgtgatgttacaataatcggtgccggaacaaattccggatacttaataatgtagctcattaagaggacaagtattaatatgatcaatataatggtgttgccccatctaaacatccaatgtggtggatctgtaaggatatcctgaacgctttccgaacggagttctatactgtctaaaatgtcttttttagtttccaagttctaactgatttttaacaagtctgtaatattcaccttttaaagcaaccaattcgacatgattcccttcttcaacaactttacctttatccaaaacgataattttgtctgcatgttttaccgttgataatctgtgtgcaatcacaatagcggtctttccttgaaaaaattgttccaggttttccataattatcttttcgttattggcatccagagcacttgtggcctcatcaaagaaaatatatttgggggatttgtaaaccgctcttgcaatgaaaagtctttgcctctgtccacctgaaattccaacgccctcgttaccaattttcgtattgtagcttaatggcaacccctcaataaactctttgatattgccaatttctacagcttttctcagttttgatttatccacataatcttcaccaactgcgatattattggcaatcgtatcattaaaaatatatccttcctgcattaccacgccacactgatctctccaaaatctgggcgaaatgtttttcatctggatattcccaatttttatctcgccctcattgggttcgtaaaatttcattaataactttaaaagcgtcgtttttccgcttccacttgctcctacgattgccgttgttttttgataaggaatatttaaacttaaattctcaaaaaccgggacatccgagccaatatatctgaaagacatattgttgatttcgatatctttttcgggaatttcggttatatattgctcatctttgttttcttcatcttccttatcgtgaatttcacctaatctttccagagaaattttagcatcctgagtttgtttgatgaaatctatcagctgtaaaagtggactgtttaattgcccgatgatgtattgaacggaaagcatcattcctaaagtaagattcccctccaacaccaatttagcagaaagaaaactcaccaaaatatctttcatctggttgatgaaatttccgccaaccgattgccattgctctaatgaaagtgatttgatctgaattttaaataatttgacctgcaaaaattcccaatcccagcgttttttcttttcagcattatgcatttttatttcctgcattccgttgatgagttcaattactttacttctctcttgtgaaacttgcgaaaatcttttataatcaagctgttttcttttgttcagaaaaaatgtaatccatccgaagtaaaatgctgctccaacaatgtaaacaataaacaaacgataatcataaaacaataatacaatactgaaaataaccaggttgactaaggagaataatgtatttagagaagaattggtcaaaagctgctcaattctatgatgatcattaattctctgcataatatctccagtcattcgtgtatcaaagaaactgataggtagtttcattaatttaacaaagaaatctgagatgatcgaaatattgattcttgtagaaaggtgaagtaaaatccagcttcggataacatcaattcccattcttcccagaaaaagcatgacctgagcaagaagaaccagatagataaaattcaaatcttgattctgaattcccacatccacaatactctgagtcaggaatggtaaaataagcgaaagtaaacttcccgctaataatcctatcgccaactgaacaattaacgatttatattttagtagatattttgataaaaaaacaaaactagctttactttcctgatcgtcaaattcggtttggaaaaatgacggtgtcgtttcaagaatcaaagcaattccctcttctgtgttctcgttagcattttcgccgatccatcttttgataaattcttctctgggatagctaattaatccgtaactcggatctgaaatatacactttgttgtttttgtcgattttataaactacaacaaagtgatttttattccaatgtacaatacaaggaaatggaacttcttcagctaacgtattaaaatcgatctgcactcccaaagaacggaagcccaaatcttcagcagcgccgctcaaccctagcaagctacttccttctcttgtcgtttctgaaaggttacggatctgctgtaacgatatacttttgccgtaatgtttgctgactatcctaagacaggtagggccgcaatctttggaatctggttgtttataaaaaggaaatgttttacttttcatttgcaatattttcatcttccaacaattcttctatgaaatagaaaatatcttctctatcgtaatctctcgggaactgatagccattgataaaaaatattggtgtaaatgtaaaacctaaatttatattttctactgccgtttttataacatccgacaaatcttcggcgattgattcaagtttctggtgtattcttttttcaaaccaatattctactgattctaaaaatatttcttcacccttagtcttatatgtatgtaaaaaatcagacattaaattcgttaatttttcatcatttttatccggttcgaaataattaaacctgatttgtgcagaaatatctttaggatagctttctagtaatttttctataattttatgagcatctttgcaataaccgcaatagggattagacaccaaagaaatatgcagttttgcagttggttttcccaatttgaaaacatccgtatttcgaaagtttattttttcctcactaaaaagttctcttttaaagattttgtaattccttttgaatttcaaatttttaatgtccgattttctgtatttgtctttttgcgccactaaatcattgataaaaaccaatccaaaaaatgcaacaaaaaaagcaattacagataaaagaaacgtgtttacggaaaattcgttattgaaaaacagaacggaaattgtaatctgaccgactaaaatagcaatgataaataaacagattctacacaatgttttttctacaaaaacctgaacaaaaagtgaatatccaattattaaaattgaaaggcctgaaacaatcttcagaactccacttgtacttggaaaaaataaccccacaatcaacagtgccgaaaaatagaccaaactaaaatccgacaattttaatccgaggatattaattttatctgaatctattattttcgtgcagtttgtttgtgtagaattctttgcagatgaaccacaaaaattattcaaaaccacagattctttgcctgattttttattgaaaatttcaaaagaaatgtaaaatccaaatatagataataagttaaaaatcacagatccccaagtttgcatccaaatagagtggaagactacaacgcctagaaatgcatataaaaagtaagaaaaatgaagtttgcctttctcttgcttatattctgttttttcaaaaagaagaacaaaattctctgcattttttaataagtgggttttggaaattttttcttctttatctgaaaaagcaatataacctattttatcctttctaatcagagtaaaactgctattatatattgtgatgaactcatccgaaagctcttcccaaaattctttatccaattcataggcatcatttttaattcctaaaaaatttagagtatcactaaaagccaatgcactcgggtagtgtggatgggattggaattggaaattgaattcctgattattgaaattaaaatgatttaagagtttatttaagtccattatttatactctattttatgattgagttctatgtggttattattgtccctaatattcctttgaatattttctgtcatttgttttaaattgatagaaataggatttccattttgatcaacgtttttataacgtatatttcgtacttttacctctgaatatgggtcattatagaatgctatttcaagttttttcagagtctcccattcgattttattcttaggttttaatggaggaatgtaactaaaaacctcgtttttaacttcaattaaattaaattcataatctgagttatcgtctgatatttttacaattagtcctggtaatccattgaatatatagggtccatcttgtattggtattgtttgagtaaaccaagctgtccaatttcgtccgccataaaatagtcttgccttttgacaatcatatctaccataatttaacttatctggaaagacagaccaagttaaaatttcatcaatacttaacgaataaatatcactaaaaaaaggtgtagaaataattttatttacctcttttttcgaaaggcttttttttacgtaaaattgattattataagacattttaaatcctaggccgtatcccgttttttctatcagagaatctgattgtctatctctatcggaacgaaaaatggattccttatcaaaaatatcaagataaaacagctcattgctataataatctttattggaatttgatttatattttccttcatatataacagtaatgttttgggaagaaaaatttacagataaactgtacagaaaaattaaaattacctttttcatcttgtcctaattaaaaaatcaaaactcttgtctttataaaataagacaagatgtaattatattacatctcgtcaaatgattatcaagataggttatatacatcttaaacagccacttgtagcaacacctgagctattataaacccaatataggccacaatctaacccatatccgccacatgtgctgtctccaagtgaacacatatttccacaattaccaggaaccattttcccaccattcacgtttcttaattcttctctcgaaagttttttcaaatttttcatttctaaatttgttttttttaagttcctactctaattaagcttttcggattccgctatgttatattttgtgcaacaaacttatccattcactataagatttcctaataaataaaatatagatttataaatccagggcatgtaaaatggaatataaataaatgaaaatcaaataattgagatgtattttttttgagattttatgattaatttattctaacgtttatcttgtgcttttttgctcgattcttctaaattgaattgcaattttttgaacagatatgagccatatattattttttgtaaatattacgagtattacagatatctggttgtttatagaagatgaagggtctttttatttattttttaaccaaatcttgcatatcataaaaattgatggcattttcttttaaaggacttttgctccattcttcccattctcctatgtaaggattataaccacattttaaaggttttgagatgtctaaaccttcttcatttttgtgggtctgttccgtgtaagctctacaatcggtacagatgtagcgaaattcacaatctttacaaacttctacattatctttggtaaggttccagtattttttgaaatactttttgtttaatgcttcttctaaagttgtatcttttatattcccaaaagtttgtggcattgctggacaatttttgatattaccattaatatctatcgcgatttttttatgaagacacgaattatgattggtagcttctaaaattttggggagatttgtgttgaaatattttaaatctactttgccgcaggaattgattttcacttcttgttttataaaatttacatcaaatctatatttatctttcggcttaaaaggatttttttcacaattgtaaaataccaaactataaattcttcctgtttccaagtttagtttttcaataaaatctaaatttacttcttcatgataatgtaaaaacaattcaattccacaaagaacggatgtctcaaaatatttatcaattcgctttatttcttcaaaatttaaattttttttacaatatataatcagatgtttaatatccaatctttctattgattctttgattttttctaaaatagaaagatcatctaattcaataaaaatattagaaatctcgctggaatcatgaaattcaaaagacatgggtggaaaatttctatcccagtctttatttgaaataaaaccgtattcttttcctaaaagaaaatccacatactcttcaaacaattgtttggaatcttcatcgtagcttgctatgatattttcaatggaattatattttaattcttcgataatttcacctaattctaatggcatcaactctgaaatatttctttgaaggtcagaaacaagaattcttgttgctcctcttgttacaaaaatattgctgaataaattgaaatatctcatataagtcttgttaaggatttcataggtttttctcgaacataaaaatcggtttcgtattttttagattttacataataggttattttattccttgaaactccaattctccttgtcctaattacttccatatatttgaaagtaagaggcaaattatttttttcttcaaacatatttttcatagataggttgcaatttccttttccaacgaataattacaaataaatgaaagtcctaaaaactgcccgattggatttacttctaaaaaaaagtatctatctccactcttgataaaatctatagagccacagtttaaatctaatgaaagcattaataaacgaatattttcttcaatacttcttggcagattatacctaacatttctattagggacttcggtgttatattttctaaaatcaactttagtttgctcatcattttgggaaaatattgcgaaagaccaacatttaccatcaagataaaatgttctgatttcaaaatctttctcaattttttcttgaaaaaaagaaatgaaaaaatcattttttatatgttcatccacaactgcagtatataataccccgtcagtatctttttcaattgattgaagcgtaggatttccagcgattggttttgtaatggtccttctcaatttgacattttttgtattatttgatagataatagtctggaacatctaaacctgccttccttgccttatctaaaaccaataatttatttacatgtgtattagattgtttgttaagatgcttttttgactctaaaatgtgcattacatattcttctaaccaatgctgagtttcattcatgtggatatttactccctcattatcataataaaatcgtttaaattttatcccacctcttctgtaccaaacactagtaatttcatctaaaaaaaattgatttttttcactttcgagaaaaatcttagtgtctttcatttttatctcaaatgtttcatcttcattaataagaataaattttttgtcaaaacgaaatagccattttataacttctgttgtcgtaatttctttttttttcgaaataattaaaatcatcttttctttggttatttcaattatattttattttatgattgagttcaacagggttattattttctaatatatattcttgctgttctttgttcattcttttttgtctgatctaaatcaaccacctttcaatctttacttataaaaaagattttcttatctcctctttgttccaattccggatgtggatttggtactaggattttgccaattgctcataattaatctagccgatatccaaagtttttagttaagcatcaaataaattctttagtttctttgtatcaagtcaaattgacaatctctaaagcatcaacgatagaaaaacgtagaaaaagggcatttgcgcccttttttactgtatgacttctctaactatagtttgctcaataatcttactgctcacacccgacgccagctgtagcatcgacgatctatttcaattaattactgccaaccactcgtcctgcccacacccaaacgccactttgaccgtcagtataatagtctatatctgacccaggaccttacgcataggaagtctccttgctagtacttcctcttccaattccaccctggatagattttaaatctcctagttttttgttttctaatgaagagaaatttttctccataccggtcaattttttcatattataaaatgtttttgatttacctactcattagcttttcggattccgctatgttatattttgtgcaacaaacttatctcttcactataagatatcctaataaatacaatatagatttataaatttacagggtatttatccacctttaaaatattgaagttgaatgttttaaaagtggattcagaaattattaaacaatgttttaatgtgccagaataggtaaccagtaataggtaattgaagtccaaaaaatatcgctcgctacaaaaattgaaacaatatttttttcttcaacttcataattcaagaaacccattgtcagctcactacttttgtagaaaaattcttctgcaatttctacttcatctatttagcggaaaattgttcttttatatttggacctcatagagaatacatataatctgatctaattaaaaggaacttaataaaataaatttttaataaacaaatttaggattgaaaaagggtttttgcgccctttttcttttaatccacagcgtatttaactatgggttactcaatcgttctccccacacccaaacgcccgctgtagcgtcgatgtcttttttgaattacacaccgccgaccactcgtcctacccatttccaagagcctgaagcgtcagaataatagtctaaatctgaattggttccaaaagcattggaattctccacgctagcgcttcctccttgtccaatcccaccttgaatagattttaaatctactagctttttgttttctaatgaagagaaatttttcttcattcctgttaattttttcatgataaaaattgtttttgattttcctactcgttagcttttcggattccgctattttacattctgtagaacaaacttatccgttcgttataagatttcctagtaaatacaatatagatttataaatttacagggcatcttctttgtttcaaagttctgaatttcaatatgttatttttaatttcatgcctttttagacaatatcttaatgtgttggaataagtagtaatcatatacaatcatttataacaatcttaagctggaaataaaagtcctgtcgatgtgcatatggaaaatagcaccaaaaaaagaaaccaaaaaaatagaattatattccctgaaatttttaaaaccagacttgtttattgatatgtttgcaatgattaaacttcttgtttcctcaaactcaaccgatttaaaaatgtctggaattttagtttaaatcctataaatttcctattcaattagttattcaatcacttaactctttcttgaaagaattgttggatttactaatcattctgcttttcagtaataggtaatataagttctgaaaatatttgcaagatgtacaaaattgaaacaataatttttgctcaactttatagtttatggaaaccattattaactcattgtttttgtaaaataattttcggcagtttctatcttgttgatccgtatctttataatgttggaatcttcatcgtagcttctatgacattttcaatagaattatttattaattcttcgataatttcatctatttagtgaaaaaacggtctattatactttggatgatattatacctaatagagaatagatatattccgagttaaatcaaaagaacttaataatacaaaaaataaaattttcttaaaaaattagagataaagcaaaaatgaataaaaaaaagggcatctctgccctttttttatactctataacttattaatgccaacttaatctacctacccaatgtccattttcatcataataatctatatctccaccaccaacagaattatatacattggaagctaccgtactaggggctagggcacctttgatagaatttgaatctaccagctttttgttttctaatgaagagatatttttcttcattcctttcaattgtttcataagaactaaaaattgtttttaattttcctactcgttagcttttcggattccgctatattacattttgaggagcaaacttatccgttcgcaataagatttcctaataaatacaatatagatttataaatttacaggactttttttttatttcaaaatattggttttcaatattttaatttaacatccaggactattcagacaatatcttattgtggcggagtaagtaatcataaacgatcatttcgaacaatctttggttggaaataaaagtcctgttgatgtgcatatggaaaatatcactaaaaaaagaaagcaaaaaattagaatgatattctcttatcttttttaaagccgatttggtttctgatatgttttcgataattaaatttcttgtttcttcaaactcgtccgaatcaaaaaatgcgtgatattttggttcaaatttcataaattttttattcaattggttattcaatctcttatctgcattgaactctctcttgaaagaattgtttgattcacgaacccaatcatgcttttcagtaatcggtaatttaagttctgaaaacatttgctcgatgtaaaacatcgaaacaataattttatcttcatcatcataattcaagaaacccattaccagctcactgcttttgttgaaaaaatcttcggcagtttcgatcgtctcgattccgtatctttctaattcacggacataagaatctataagaatatttgcaatttctccagaatcaacaaaaacttttaaatcagaattagaaatctctaaaattttgccataatcctgtatatccgaaagttgaaaccttaatcttatatgaggttttggatcgttgtaacggataaaaaaccatttcttaacgaggttctttttctttaactggctgactaaatgaataatggtttcctgtaaaataatatctgcagttttgactccacagtaaatttttaaatacagccattcgcttccgggagaaaatattcttgtaatcatttttaacgttgggttttatacattggaaatatgaattgactggtaaaattttcatcctcattacataaaaattcttcagcaacaactttgttttcatttttaacggaaagaaaaaacaaattaaccaaatcccaatttttaagattgataaccaatgtattgtcagatttcgtccattgaatccattgcggaatttgccttttttttctccagtattcgacctgactaattgtattttctttattagaatctttcaaaagcgataaaaaactctcgatttcgttggcattaatcttccatcgggccttggaaagaatgatattgccgtattctattcttggcaaaaaatggtaaatacttcctaaatctccccagtcaaaatgtagaacaggttttatattttgattgcccaaatcacataaaaaatggtagacaggcagggaatttgaagagtaattatgagcatttgtaagaaaggggacaacctctttatttcgtgatttagagcgaagaaataattttccattttttatagacaagtataaatcctgtataggaatctggttttctgtgggtaaaaccgattttgcgatatagggaatttcatattccctcatttgtggtcgtctgagaatatttcctgttcttgcttccggaagatggatgatttcagctaaaattccatcactgaattctttttccttttgggagatttctttgattaaagtacctatatccgatttttctgaacagaatcttgccaataatttgcccgcatttccactcccgaaattgagaaccatctttttgtcattatttatagtgacaaattcaaccataaaatatagagtattcgccaaatcattccaattctcttcaaaatcagaaaagtcttcatccaaaagttctatggaatattttttctctaaaaaagcttcctgaagcttttcattgagtatgatctgaaagggattaagcatgagttcaaggcttcttttctcttgcgaaaatggtagtgccaaatcttccaggtaaggatgtatgcctttagcttgtatatcttgtctatagccaattccactttcggtatctaaagcaaaagctagaggaatttcttcgtttccaaatctttcgaaaaaaacagttttgaacttttcaagatgtgtattttgcaaattaaataatgtggttctattaagaaatgatatacctttttttaactctctcttccattgataagataatcttactttattatcaaagtaaaggtcggtctgaaaaagatacttttgttcatattttacgtctagcgtttcaatgagtttttcgatttcggtataagaagaaatctggttttcaaagtaattatccagctcattgattttacttttgatggcaactaaaatacttttttccttttgtgcttcaatacgagttaaaacagaaaagatagaatctaaaaaatcaattcccgaaatattaggcttcaattcacttactaaaaccctgtttacaatgagttcttctatatattctaaaacttcctcagaggatacttccgcattttttatgaacgatgataattgtgaaatggttttcccatgctttgaaaaatccagaattctctccaattcctttgaaaacggagcggaagaaatggtataatccctgttcattcctttagtttcgtattcaatataacggattttatttccgattctgtagatgctattattgggaaaaaataaaagttgcttttttatatcaggaatagaaagtaggtgctgtgataaggaaaccaaaaaattcatatcgactttggtttctcttattttttgccaatccgaatatcgttttgggaaagattcatctttatcaaaatatccagtcgcaacaccagaaaacaaaccaaagggtgtacaacggttgctcatccggttaaaatatttcagaagcgtattttttaatctggattgggaattattaataatgcttgtgccactatttatagatttttccatttccggatacaattcagaagaagccaaataaatagattctttgaaaaggtttctttcaaaaatttcctgtaatttttcatcatttgtgctttcagaaaaaatttcttgaaattctttatagggcaatagtggtgctctgacaacaaaattgtcaaaaaaaacatacggaaaacgtggcatttttaattagtttttgggctgataatcaggtaatcctaattgccagaatgcaaaggcaaacatatctccgatattggcatatctttgttctatcggtatatctcctccatgaccgccagcataatctatttttaacaaaataggattaccggaagcattatttgccagcaacttagcagcaaatttcgtaggcatccaaggtgaaaccctagggtcgttaatccctgatgtcactaaagtcgcaggatattgtattccttttttaacatgatgatatgcatccatttctaataaacctttgaaatctgcctgattacttaaactaccatattcttgagccgctgattttccgacccctccatattcatttctcagagtattcaacactcctgattcaattagtactactctgaacaaatcaggtctttccgtcatagccctacccatcaatattccacctgcacttcctcctaaaagtgctattttttttggcgatgtgtaattttggttaatcaaatattcggtacaggcaatcaggtctttccaagaattggccttttttgatttttgcccgtctatgtgccattgttctcctttttctccacctccccttacatgtggaactgcaatcattccaccttgattagcccataagagataacttatggaaaaatagggagaataagattcggcataggctccatatccattcataagaacaggaattttgccattctttataatatttttattataaattaaagacaggggaacttctgtgccgtcgtacgattttacggttatttcttctacgataatatctttaaactcaggatactctatggtcggtactagattttctgatgtgaaattatttttttgtaagttatatttaaacctttgttcatcatttgcccatcctgaacagtttatccaaatatccgaaaaatcctttccttttgcttccatataaatactaccggctacaaaaggagttttaatatttacttcttttccgtctttatacaaatagaattttgcttctacaccattttttgttctagtgtaatatattccgtctttggttacgacatatccggttatgacttcatcagatttttcaggaaccagaacttcagggtttttgaaatcgggcttttttgcactcgttttacaaagtttgtaattcaaagagttattgtaagcagaaagaaaataaatatcatcacctaccaatctcatagaaggtattttgtcttctttgttatacaaaggtttccaattttttttaccttttaacagatcttctttgttgataataaatgtccttctaaagtcttcagaatcaaccagatttccaacataatatctatcgtcagaattgaatgccataacagcagggtatgtattttcatctatatttagattaggattatttagttttgaaaatacattatttaatttttttgggtcttcacctatcttgtaaagtatggactgtatattttttccatattctttagaattactatcaataattggataataaacatagaagaatcctgaattgtccactagccatttgataccgccaatgttggaagggtctgtatttgttacaatttccggatgtacaaatttgttatctacatctatcacaataatttcagagatttccttcccattttcggttaaagaaacagccaatctgctaccatcccaactaggacttagcagattgactataaattgatgctttgatttacttgaattttctttaaaagaagagataaaattatcaggatcatatagtaattcttcttttccactaaagccatttctaaaataaacttttgctgtcgcttcatcagaacctttttttaaataaaaatatcgatcgttgcccgctattctcaaattcgatatagaaaagccttgccttttgtcaaattctagtcgacttttaatataagaatctttgttaggaattttattaataacagaattcgcgtaatctgtttgagacttcatccatttgatagttgaagaatctttcaagttctcaagatttctatattcatcaataaccgtagtcccgaaataattgtctttaattgcaacagacggtgctaaattattgttttgagcatttaataataatgaaaaaaatagggcaataaatattttcattctcacttttataggttaattaaacttttataggtccttgtggtggtttgcttgcattatcaggaaaagcacattgcgggtccgtttttaagagcaaagcttcacccccttttattacttgcaaattagtgatttttgaaatcttcattttgtttaatgaaagctttttttcaatcggttcctttttcatcgttataaatttaaaattgagatgcaaatgaaattatattttttgtattctcataaaatctgctctatcgatttataaatcgatagataaaaaaaagactataacaaattgaaaatatataaattagaactttttacaattcgcttttataacacatgtttcaacaagcattctttatgcacaaatggtcagtatttttaaaaatttatatctgtttaaatatttaaaaggtatttttgcagaacgcaaattatgctatgaaaaatttaaaatacttaatcatattattactttttggttttaacaatttattttattctcaaaacaataaccttgacactttaaggaaatattcttatgaagaattggaagatattttttacagttacaaagatggtaatcaggttgaaaattctaaagtaatagcaaaatactatcttcaaaaagcacgaaaagaaaaaaaagataaaaaatatttagcagaagggtatgtgttaatccagtataatcaaaatttacccgttgctttaaaatatattgacagtttaaaaattattagtaaagactttacggatgatagatatcctgcacgtatttatttgcttaaaggcttattatataatcaatttgataacgaaaaagcagccttagaaaactttgttaccgcattaaaatatgcaaaagaaaaaaataacaaacggcaaatagctattgcagatcttcaaattgcctatttgaatggctatatagggaaacatgaagaaacagtaaaagttcttgaatattattatactcatcaagattttttaacagaccaggatattgaacatatccaactaagtttagctgatgcttatcttgatattcaaaaatatggagaagctttaaaactaatacaaaaaggaataaagcagacatcaaaaaataatgaagagttgcaatataatagatatttgatcttgctgggtaggtataatataaaaatcaaacaatattcaaagactatagaaaatttagaaaagtgcaaaaaatactttttgaaaaataaacttgattttgatgcaaactatacaatgctttatctaggacagtcgtacgctgaaataaaaaatagggaaaaagctatagaaaattttatcaagattgattcgattattcaaacaaccaacaatacttttccagaacttcgatatatttatacttatatcatagattattataaagagaaaaaagataaagaaaaacagctctattatatagataggtttctgaaagttgatgaaatattaaatacacagttcaaatatatttctcgggaacttccaagaaaatatgatactccaaagcttttattagaaaaggaggaaataatcaacaaattaaaaaaaagaaggtatttatcttttatcactattggaatgctatgctctatggtaatcattttaacttttttgtttgttaaagcaaaaagaaaagaaaaagagtataaaaagaatgctcaggatttaataaaaactgtcaatgacaaaagttattcttcagaaaaaagttttgaaagtgaaagaactgctgacgaaatagtaattgattctgaaaagaataaattatctgatgatatagtagaaaacattttgcgaggtctaaaaatatttgaagaaaaagaacaatatttaaaaaatggaattactttaaataacctggctaaaaaacttaaaaccaactctacatatctgtcacaggtagtgaatacttacaaagagaaaactttcgccagttacttgagtgatttacgtatagattacgctttaattaggttggtaaatgataaaacgttccgctcttacaaattgtcagttattgctgaagagttgggttataataatgaacaggctttttcaaaggcttttaaaagacgaacaggaacaacactttccatctatataaaggaaattgagggaaattctaattaaaattctcatgtaatcttccccaaaaatcggagcatttaaaaatatagtttttaaatttggaagagtatgaaaacagtaaattttcagaagtttagatcatctgaattagtcaatacttaatctgacaattataatcaaattgaacaaaacagattaagtattgactaattcacctcaacatcggtgtttatgaaataaacgtaaaaactactcagatttcctcgcctcaaatccatccttaaatctcaaaaaatcttccgctttcttcggattgttcttgatccaaagcttcattacttcagtattttcctgtaataattttatctcattctcattatagaacttttttccttcatcagcaatttcattgagaatttcctgccgaagttcactcttggctttgatgcttgctttgtaccaattggttgcgaaattaacggaaataatcaaaataagaattcctaaaatcattattccaattccaccccagataaagttttccgatttttttgacttatttttaaaattttctaagtaatctcgggtttctttcccaagaatcatttctattttattgggaataatggctaaaaattgatctctcgcaagctgttccttttcatacaacccaaatatatctttgcaagactgattcactacaactaaatcctgttgcgcttctcccatcataaaaagaaagttttcgatattctctttcagctcagcattggattccatattcttatcgttcgaggctatatttctttcattcgagttgatgacattttccaaaagttccattccgctgcttttagaatcatcgttttgtttttcattttccatctttctaattttattaattattaaatttatcttgattttcgtttctttttccaaggctcatcatcgttctcaactacataacttggtttcagaaagtcttttaacagatcaccagcaattcccattacactttcattggtttcagattttgaatgaatttcatttttattagcgtttttcactgcttcatttccagtgattaattttaccacatcgccaaaatcagaatcgattgccgaaagagaaaatcctacatttttctgaaaaaacaatccctttctctgttgattaattccagttttatttatccatatatcttgtactctatttttttgattggttttaaattctccatcatatttaattctgacggaaaatcctttctgctgaagatacgcttgaaactctttccaatttccggctactttttccgcctcacgaactgccttttttacttcaaacaagtatttaatctcagagatttttaagtgattcgagatttctgatagtttgtaaccggctttataaactctctctgtttgatgatttttatccttctccatcaaaatacgcatccccgaaattccgtctttcacattgcttgacagccgaacgtcaaagtctttttctttcatttttaaaatcagcccatcaaaattatcggtgacttttaaagcttcggctaagtgtttcagcatttcagcctttttctgaatcccaatttcaacatcggtcagaagccctttctccttgcagacttcccggacagcttccccgaatcgtcttccgatgtcgtgtgatttcacggtacatttcccggaaatatcaatcctgttcactacaaagtggatgtgtttctgtttggtactgttgtgaatatccagtcgaaactggttgtttgctgtcacaccgactttatctaaagcccttgtagcaatctctgcaaattctctatccgtcaatttcctgccgatttcatccggttgcgaaatatatcctgtcaatgcccatttcttcacttttgaatttcggtcagcgacagttttcatttctaaaaactgcccttccggagttgaactcaaaagacaattggaagcaatcatttctgccattcccttgtcatttccgttgtattccaaagcaatttttgtaatggttcttgtagctgcggaattattcatttgtattgttgtgtttaatttttgaatacagatattgatggatcagctctactgtttcttcaattttatctaaaatttccttcttgttatcaaaaacattccattcccgatttcgcaaaagattggttatttttttgaaataagtgccgtatttaagtaagacttcatcggtttgaaattcgttgatcttgagttctctttcaaacaaaatattccgaatgtaagcggacagtttgagcggatatttttcctgtctttgaattagagttttatattcggaattggtcattcggattgaaatgaccttgtccagttttttattctctttggtttttaagccacctttccgacctaattcccggaaatgtttttttctcttttcctcggcaatcttagcttcattttctttagtggcttgttgtatgaattcttttaaaaagtcatttttcatcgtgttaatttcattgtatttaaacccatttctgacgataggaagaaatcaaaaatcccaattttataatcagcggacacgcttattgtaaactttgggtactttttgcactagctacccaccgtattttacctatgtgtatttcgcttaccttctcctgtatcgaacctgcctttcatttgatggacttttgtgaatcagccaatcattcaggtctttgaaatctgaatacaagacccggcagtcttctgcgttttggcttttctttttaatcatttcaacggcacggtttccggcttggtcattgtcaaaatacagctcaatgtttttataattttcgagagtatttttaatattagaaatcattgctaccgaattcaaaatgatatagtcggaaggtcttttttctaaatagctttctacatttttaaaggaaagaaagtcgaaaaagccttcaaaaaccctaagtgaatctgagacgtttgctattctagtgatgtcttttttaccaagacatatttttgaatatttattgcgaatttcataaccgcctgaatcattcttgaaaccaattccgaaatagtttttgtcattcatctgataatggatctcttttaaaaattcggtttggttttgcacctttctttcattcaaatattccagaagtgccgggtgctgaacatttttgagttcaattatctgataagtttttggaagatcttctaatttacgggttgaaatattttgaggctgaaaagaagaaaaattattattttctgcccaaactaaaacttcacttgccgaagcattcagatattttttcataaaatcagtattgtttcccccaattccttccgaatgaagataccaggcgttaattcgtttattgagtttaaaagaggcctgggattcgttggcaaagggattgagataccaggcttctttttcattttgtttcatgggaaggtgtccgagagaaaggaggacttcttccaacggtatactgttgaattgtttgcagttcattgttgtattttttttaaagatttgtacttgttttaggaataaatccaaggaatgcttacagcttcaagtgagtggatttgattttgcaaaatttttgatgaattgatgagaaatcaatgtatcttattaaatattaaaaagttacaccctcatcaaagtctcatcatctcatcaaatttgaaatattctcctcatcagtctatcatcaaaaattatggttctaaaatttgatgagggttttgatgagacgtaattaattgattttattttcattatcaatcaattcatcatttcatcaaatttttggagaacgaaatttctttctactttaaaatatctgccagtcttgttttgctgatagaaacttccgctgtaatcaatatcatatttgatgtaagccaacgaattgttttgaggttcaagtttccagctttctttgagaagcttccgcacatcgttgaccgtccaatattggttcctgaacatcttacccaacatattgaagatatcctgcgggataaattgaatttcctcatcctcggtgctttcaaagaactcatacaaaagttcgatgatttttgattcgagcttattgttgtttttccataccagtttttgtaatgcctttgtcctgatttgtgaatctgtgaaccacatacgtgtttccctgggactgtgataaagtctttgaatcagaaagcgcaggaaatagggaatctctttgattaagccttgtaaaaaatcagtgttctctgtcttgatggattttactttgattatccagaaccggatttcattttcatcgatttgaataaagttgtcctcattatttgaacagagaatgaatttcccaaaaaattcaatttcttcccggtcttttcctttggcttctttcttgtccttatcggttgtggaaaggtatttcagtcgctcagtgatctcttttttgtcaaagaatacttcatcaatggctacaataagcatcgaagtccagtccgcattgaactgactgctgaaggaatcgcctttgatgtaggtcatattaagcccgaaaatagatttcagccatttgatgaaggttgattttccggtagaacgttccttactgaccaaacaaagaattggaagcatttgagttggcttttcaagcaatattttgatgtagtcgaaacccaattccaactgttctccgaaaatatgctccataaaccgcagggaaaatggaattttgttttttaaagcttcggagctgagttcttcattaattggctgaaaaggaatttcattgtacatattataaaatccctctataatcttttggtactgcaaatgtgaagggatacagcaaaagccatcatacttcgggatttttaaaacgtagattttaccgtggtcactgataatggtctcacggttccatcgtaccaaaattgatatcttgtctccggagatcaatggtttttctatggttttgtaataggttgttcctactcgtaaatatgggattttttcggtcatctctttaaagatttaatttgactgcaaaaaagctttactactttttccatttactagtaatttcttcttcaaaatcatcatatccggtttcatcagaatcggacaaaacataattttctaaatcttcttttttgaagtagattttcttttgacctttcttcttatatgcctttattttgttatgatgtttaagctgatataaataatcagggtcaagatttaaaaaaagtgcagcttcttctttagaataaatatttttaactcctaaggaaagaatcaataaggcttttgaagtaaattcagtttgcgttttaattagagctacaatctgttcctctaacgcattaattttttctgttggttccataaattttttttataaaagtatatgcttccaacattggttaactcagtacaattttgtaaaataaacctaaataaaataaactaagtattgagtgaattttggcattagttttctttatatataagaaaaatcattgcaataaaaattgcaatgatttagtgattagttaatagaaaagtccttgtattacaaataggataattaaattttatccttatatcttgacaaaatatcagctgttaaactgaaattccccttattcaattccaaatagtcggtttgaagggtttgaaaagtgctatatttatttataaattcaagaattgcattttgtcctgttttccaatctcgcgtatcgttatcaattaattcaaaattatcttgaaagaatctgaaaataatctttttgtttatctttcctgaatacacttgtgtaaaaataattggttgtttgggaatcctaccttttataagtacttctacatcatttatagatattggatttattttatacttttcaataattttttgagtactaacactagatttcttaggagcgaatggaatttcaattactgagtaatgttgtgtgagatttttaatttttgtgtgtgaagaagtcactgttgttttgatcgtatcaagtatttcaaaagtcttatcggctacgtttatctttttttcctgaattcttgataatggataataatcaaaaccctgattaaagaaatttttgaaggtttgaattatagtatatggtattttattttcgatgatgagcattagcccaatctgtataattatgttaagaaataaattgacaagaatagtaagccaatcattatacttaattactgatacgccatacgttaatgcaataaataatgacaataaagaataaaatgcgataatgattgctctattacggtttaagccatcgtaccattcaaattgttcctcacaggtgaaatgaattacgacaggagttagtgcaaaataagctcttgctaaattataaagtgaaattccaactgtggagatagcccaaatccaaactattaaatatgctaacgattccataacttatgctttttagaatataaaaatacaaataaaatataaaaaagataaagcataataaagatttgctgttcgtcaaatgttagtcagaaaaataaaaagcttttacgaatttacgtaaaagcttgattttcaacgtggtcccacctgggctcgaaccagggaccacctgattatgagtcaggtgctctaaccaactgagctataggacctcaaaacttggttaaattttgtgtttgcaaaaatagtaaaatttctttcactacaaaattttttcttgcttttcttggcaaagttctaccagcacgccgtttgtagatttgggatgaaggaagacaactaatttattatcagcaccttctttcggctcttccgagataaattcaaaaccttcttttttcagtctttgcacttcctcaagaatattttccacgccaaaagccagatgatggatgccttctccttttttttcaataaactttgagatcgggctatcctctttactcgcctccaaaagttcaattttgctttctccggcagcataaaaagaagtaactaccccttccctttccacggattcctgtttgtaagattcctttcctaaaagctttgcaaaaagttcatcagatacgcctaaagatttaacggcaatgccgatatgttctaatttcataaatatttaaataaattaagtcgtaaatttgatacagcgaacaaatttcaaagtatcaattcaaacaaaagtactaaatttgcagaaattatggaaagtaacagacaaagaaaagtagcacagattatacaggaagacttcgcagaacttttccgcaaacaggcttcagaaagcaaacaaagcattctggtaacggtttcggatgtaaaagtaacggcggatctgggtattgccaaaatttatttaagcatatttccacaggagcaccgcaaagccgtgatgaaggaaattgaagaaaataaagcacaatacagaaacttcatcggtcagaaaatggcgaagcaggttcgtgtaatccctaatcttaatttctacttagacacttctctggacgatgttgaaaaactggaacgtgaattgagaggtgaaggtgacaaccccattctttaacccttgaaaaacattgcattttatatcgcttcccgataccttttgtctaaaaaaggaagtactgccgttacgtttattacgtggttggcagttggggcgatgacggttgccgtaactgcaatgtttgttattatctccgttttttcggggcttgaagatctcaataaagaattgatttcaaatcttcatgccgatcttacccttaaaagttcttccggaaaaacactgaaagatttcgataaaattaattccgttctcaaaaacaataaagaaatcagtaacttttcgagagttattgaagaaaaggtatacattagctataacggcaaaggcgatattgcttatttaagaggggtagattctgcctacacgaaagtaaatcccataaataaagatgttttttatggcgcttatccgagctttaagtattccaacgaagttttaatggaaaactctctggataacagactttcgattcctgtaccatccagttcagattatgcaacgatctttatgccgaaaccgggaaccggaatcattaataaagaagaagatatttacaacaagaaagacatcctcgtctccggagtttttgcaggaaaagaccaactggacaattatattattgctcctgttgaattaactgaagagcttttaaatctcccaaaacattcggcttatcaaatcgttatcaaattaaagaatcctgaaaatacagactccgtaaagcaacagcttatttcttcccttggaaaaaacattgaagtaaaaaccaaagaggaagaaaatgcagcattctggaaaatgatcaacacagaaaagctttttatctatttaatttttgctttggttatcttcattacgacattcaatcttgcgggcgcgattatcatccttcagttggataaaaaagaacaggcaaaatcccttatttcgttaggttttccgttaagtcatttaagacaggtttacttttataccggagttttaattgtcgttctaggaattatttcaggcttacttataggaaccggactttgctatttccagcagttcacagagttctttaaagccaacgaaactttaccttttccggtgaaaatagtgggtaaaaattacatcactgttgcggttaccgcatccttattcggctttggaatttcatgggcattttcaaagatcagcaaagattatattactaaaaattaatacataagctttcattttttcgtatctttgcgtcccaatttttaaaaatgaaacgtaaattattctcttttttattgagctttgtcttgataagtacctttgctcagattcctacgggatattacgacggaactgcaggtctttccggagctgctttaaaaaccaaactgaaacagattattaccaacggtcacgttgacaatggttacagtgcactatatagtggttatgcaacaacggatcgcgataatattgcaggaattccgggactggaaaacgataatactgttttagatatgtattccgagaatcctaacggaacagatccttactcatacagttatccgggagcgcagtgcggaaattataacagcgaaggcgactgctacaacagagagcatatcgttcctcaaagtttattcaacagcaatgctccgatggtttcagatattcatttcatcagaccgaccgacggaaaagtaaacggaatgagatcaaactttcctttcggaaaagtaggatcggcttctttcacttctcaaaacggatcaaaactgggaacttctgtttctccgggatattcggggacggtttttgagcctgttgatgcttttaaaggagatatcgcgagaatggttttatatttcgtaacaagatatgaaactcagctttcaggtttcggaacaggaaatatgttgggaggttccgcatttccgggattacagacctgggaactgaaccaattattggcatggcatatcgcagatcctgtttctgctaccgaaattgcaagaaacaatgcttcttatacttatcagggaaacagaaatccatacatcgatcatcctgaatacgttgctgaaatttggggaactccggttgctgatacacaggctccgactgctccaaccaatttggcgaccaacaaccctacttccaacacgatttctttaagctggacggcttctacagataacatcggtgttgtaggatatgaaatttataaagacggggttttatatgctacggttaccggaacaacggctacggtttccgggctgaatccttctactacctataatttttatgtgattgctaaagatgcagcaggaaatgcttctacagtgagcaataccgcttcaggaacaactcttgcaggaggacagccgggcggaagctgcggaacagaggatttttccaatattccggcggcggcttcaagctacacaacgcaaacatggacgagcaatagcattacatggactgccactgatgcaagaaccgatcagacaattaacagccgggctattaccatcagaaacggaaatcttacaagctctacaatttcaggcggaatcggaagtttaacagtgactacgaaattaccgttttctgactctgcaggtaatctgactttacagattaacggaactaatgcgggaactattccttttactacttcagctaccactactacaatcagcaacatcaatgttcctaacaatgtggttattaaaataatcaattctgaaacaggaaaaagaatttctattgatgatttaagctggacctgcttcacttcattggcaactgcggaagtttctaaagataagtctcagtttaccatctatcctaatcctgtaaaaaacaatgaattgtttgtaaaaggagaaaatctgaataaaatttcgaaagctcagatttatgatctttcaggaaaactgatcgaaacgattgaaaatccgttcagaacttccaataaaattcatctgaaaggtttggcaaaaggaaattacattctgaaaacagattcttcctcagcgaaatttatcgtagaataaaacaaaaaaaatatttatctcaaagaccggtttttccggtctttttttttaattttatcttatggattccaacaaaaaattaggcttgatcgggaaaaacatttcctactctttctcgaaaaaatactttgaagataaattccagaaactgatgttgaaagattattcttacaacatttttgatttaaacgaaattgatgaagtggaagatgtcttttctgctccggaattactgggctttaacgtaacaattccctacaaggaaaaaatcatcgattatctggatgaactgagtgatgaagcaaaaaaaatcggagctgtaaactgtgtactgattgaaaacggaaggaaaacaggctacaataccgatgcgtttggttttgaaaagactttgctgcttcacaaaaaaccccaccatgattcagccatcattttaggaaacggaggtgctgcaaaagcggtaaaatatgttttggacaaacacggaattccatcggttacggtttccagaagcacggaaattaattatgacaatatagatgctgcttttgtacaggatcataagctcattattcagtgtactccggtaggaactttcccgaatgtggaagactgcctgaatttccctttcgaagggctttcaaaagaccatttgattattgatttaatttacaacccaaactataccaaattcatcatcaatgcctctgaaaaaggagccaaaacggttaatggatattatatgctggaacaacaggcagaaaaagcctgggaaatttggaattttcaaaaaaaataacataaattagtacagtatttagctttttagctctatatttagaggatattttaatgccactcacataaacgatttgctatgattacagaaaacaacctttctgaaaacgaggaaaacaaaaattctaacgaagtccctcaggaaaaaacatcagaacctgcagaacctcaggatgaaagcattcatcatgaggaaacggaacatgaagaagagcacgaagaagtagaaatttctcttgccgatgccctgaaggaaatggaaaaaatcatcaatgcgcccaatgcaggtgaagatttcaaaaaattcaatcagctcaaagaaaaagcaagtcattacatccatgacgaagtggaagataaaaagcatgaatatgccgaagcgggaaatgctcctgaaaatttcagttatgagcatccttctcaggcgaaattctctgctttggtgaatattttcagagaaaagcatgatgcttaccaaaaggggcaggaagaagaacagaagaaaaatctggagcaccgccaaaccatcatcgaaaggcttaaaaatctttatacgaattccgaaccgggaaccaatcttttcaaatcgataagagagattaaagaagaatggtctaaagcaggacaggttgcaaaatctgagttcaagatccttaacaacaattattttcatcatctgaaccagttttatcagatgcttgatctgaataaagaatttctggagcaggaatacagccacaatcttgaaaaaagacaacacatcattgagcgtgcaaaacagcttgaacatgagccagtaattcagaaagcgctgaatgagctgcaatatcttcacaaactatggaaagaagaagcggaaccggttgcagaagaattccgtgagaaaacatgggaagaattcaaagaaatttccaacaaaatccacgaaagaaaatctgaactttccgcagccattgaaacagagcagaacgaaaatctggaaaagaaaaatcagatcatcgctgaaattaagaaactttctgagcccggtgaaaatcctaaccataattactggcagaatgctatccgcagagtggaagaacttcgttcggaatttctgaaaacagggagcgttccgagaaagctttctaaccagaactggaatgaatttaaaacaattcttagaggattcaacacaacaaaaaacacctattataaatcgttaaaaggttctcaacaggcaaatctggaagaaaaattaaaactgatccagactgcgaaagacaaccagagtaacgaagaatgggacatcgctgttcctttgttcaaaaaacttcaggaagactggaaaaaaatcgggcatgttccgaaaagcatgacgaataaaatctgggacgaattccgtgatgcatgtaatgcattcttcaacaactatcgtgcaaagagcaatgcttctacggataactggaaggaaaattacaaacacaaaaaagcaattcttgacgagttaaaaacaatcgggaacgaagatggaagcatcgaaagaattgaagccattaaaaccgcatggaacaacatcggaaaagtaccgagagataaaatctccatcaatacagaattcaacaaaacgttgagagaaaaactgaaattaaataaaatcaacgagctggaacttaaagaagaaggattatctgaaaatcagcttacagacaaagcaagaaaaatcaagagccagatttctgatcttgaagctgaaatcgtaaagctggaaaacaatctcgctttctttaaaaacccttcaagagaaaacccgatgctgagagatacgtacgaatctatcgacgagaaaaaagctcatctggaaactttaaaacaaaatcttcacagcattattgcgggagaataaaactatttaaaatattagaaagcggagcaaagcaatttgacttcgcttttttcattcagtatgcaggacgaattttatattaaaagagccatcaaactggctcagaaggccatcggaaaaacctatccgaatcctttggtgggaagtgtgattgttcacaacggtacaattatcggcgaaggctatcatcagaaagcaggagaacctcatgcggaaattaacgccattaattctgttgaagacccatctttaatacccgaatccactatttacgttacattagaaccttgtgcacattacggaaaaacgccgccctgtgctttaaagattaaggaattaggctttaaaaaagtcgtagtgggagcgatggattctcatgacaaagtgaacggaaaaggaaaaaaaatcattcaggatgccggaattgaagtagtttcaggcgttctggaaaaagaatgtattgatcttaataaaagatttttcacttaccacgaaaagaaaagaccttacattattctgaaatgggcacaatcgggagacggatttctggataaagacttcaagccaaccgcggtttcaaattctttggtgaatcagttcgtacatcagttgagagccgatgaacacgctattttagtcggaacacagaccgctttaaatgacaatcccagcttaacggtaagaaatgtagaaggcgttaatcctgtgagaattttaattgattttgatcttaaagttcctcagaattctaaaatttacaacgaagaagcgaaaaccatcgtgattaattctgtaaaagaagaaattacagatcatgttcattttattaaaaccgaaaaggacaatttccttcagaatcttatggaagctctgtataaagagcaaattcagtctgtgattatcgagggtggaaaattcactttacaacaatttatagatgctaatctttgggatgaagccattattattaaaaatgaaagtcttcttcttgagaatggaaccaaagctcctgtttttaaccggtcaaatcctttcaaaactgaaattatcagagataaccgcattgattttttcctttcagaaaacatttaaatatttaacagtcaaaaatttaacataataaatattttataatttttcaccatagtttgaaattaaatatgtagctttatgatgaactaaaaatcatcatcatgaaaaatttaagaaaattatcaaaacatgaactgaaaagcgttctgggaggaatcgaaacctgtgatcaaaactgcataataggatattacaaatgctgcatcccgcgtcagagatattattgtcttccgatcggcacaaaatgtaccagtaataatggtcccggaaatccaggagagccggtttaatgctgatcagaaattttaatcatctccacaactaattcaaactatatgaaaaatctaaaaaagctacccagaaaagaacttaaagatcttgttggcggaatagcaccggtttgctgttcttattatcctgcaaacctgcaaagatgctgtaaaaccccttcaagtatgagctgtcctccgccttggctggaaggaagctttccttgttaacggattaaagagaactgtaacggttctcttttttattgtccgtttccgggactttttcttaaaaatattttacctttgaacaattattctaacattcgaaaaaatatttttcctcattatatatgttcaattttaagacgatagaatctgcagtagaaaatactttgttaaaagaaaagggaagcaaatttctgggttttgcattcccggtgaacaacgaggaagaactgaaacacgctttggaaaagattcgtgcagaacatccgaaggcaacgcatcattgttatgctttcagaatgggacttaacggagaaaattaccgcgcaaatgacgacggagaaccttccggaagtgcaggactgcccatttacaaccagttattagcacatgaaatcaccaatgttctggttatttccgtccgttattacggcggcacaaaactaggggtttccggtttggtaaaagcgtacaaagaatcggcaaaaattacactggaagatgcaaatattgttacgaaagaacttgaaacgactgttgagattcagtttaattttaatcagcagaatataatttttactttgctgtctaagtatgatgcgaaagtcctgcaatttgatgcgaatgaaaactgtatagtaaacgcttccctgaaactttcacaaaaagaaaacatctcggaaaaactatccgagatgcaatatgtttcgtttacatttgaagattaatcccttcttccgcccattaataaggacgcaaaataaagaagctgtaccagagagccgattgcagccaccacatatgttcttgctgcccatttcagactgtcttttacgcctacatactcttctgttgttaccgttcccgtatcacgaagccatttcattgctctgttgcttgcatcatactccaccggaagcgtcacaaatgcgaaaagcgttgtgaaagcaaacataataacccctattgtaagaacaagtttacttccactaaatgccatgattacaagtcctcccataatgacaaactgcatcagattggaacttatgcttaccaccggaaccagttttgaccgtaactgcaacatggaatatcctactttatgctgaacggcatgaccgcattcgtgtgctgcaacagccgctgccgctgcgtttctctgcatatacactgcctcagaaaggttaactgttttattttccggattgtaatgatctgttaactgtcccggaaccgacattacctgaacgtcgttaatcccgttatctctcagcattttttccgccacttcttttcctgaaagtccgtttctaagatagactttagaatattcttcgaatttcgatttcagcctccatgaaacaaaccagcttaccgccatcgaaacaataataatcaaataataaccattcatctctgtaatcttttataatatacttttcatcccatatgatgtaaaaactgtgccaaagtattgcattaatttagctatatttgttccataatttcacgaaagaatcatgtcagaaatttcagttattgaggtaaaaaacagcgaacagctaaagcaattcgtaagatttcccatggatctgtacaaaaacaatacgtattacgttccggctcttattaatgatgagattaaaatatggaacccgaaagaaaatcctgcgctgcaatactctgaagccaaacagtttctggcatacaaaaacagcaaggttgtcggaagaattgccttaatgatcaatcataaggaggaacgcgaattagggataaagaaagtacgctttggctggattgattttattgatgatgaaaaagtctctcaggcactcatcggaaaagcagttgagtacgccaaagaaaaaaatatcggaaagattgaagggccaatgggttttacgaaccttgataaagccggaatgctgactttgggcttcgataaactggcaacgatgatcggaatctacaatcatgcgtattatcctcaacatctggaaaaactgggtttaaccaaagaaaaggaatgggtggaatttgaaattatgttcccggattcccttccggagaaaatttacaaattcaatgaactgatttcccagaaatatcatctgaaagttctaagatttaaatctaaagaagaaattctgcagtatgtggatgcgatgtttgatctgctggatgaaacgtacaagcacctttctacctacactcctatttcggacgaacagcgaaaaacctacaaagagaaatatttccctttaatcgataaagatttcatcgtgtgtatcgcagatgaaaataacaatctggtttcttttgccattacaatgccctcctattcaaaagctctgcaaaaatccaaaggaaagctgcttcctttcggatggtggcattttttacaggcaggaaagaaaaacaacagggctaatttttacctgatcggtattcatcccgattatcagagacgcggtgtaacgtccattatttttaaggaaatctgggatatcttcaataaaaaaggtgtgaaatatctggaaaccaatcctgaactggaagaaaacaaaagcattcagcttctttggcaggattacaatcccgtgaaccataaaagaaggagaacctacgctctggaaatcaaataatttttcatcatcaaaaagtagacttattgtaagttttaaaatatgaagccacaactcatcattttcggaattttaattgccggattcattgttttcaatttattttttcagttaccggatgaaagaaccaatacagcagtaaatatcatctacgcaagtctcctttttgcctatatttcctttatggcgtattctctcatcagaaaaatgaaaaaataatcgttatttttaatgattctaaattatccgttttatccattttcaagctacttttaacctcataaatttcatgctttcttgtttattcgctaaatttgcaaattgagataataatgcaaaaatgaatttacctgaaagttatattccaatccttatacaagcaggtgttgcgatcggtttcgtagccatttctttgcttggagcgcattttttaggtccgaaacagaaaaaaggaaattctgtgaaaaaccagagctgggaatgtggagtcccggtagaaggaaatgcaagaacaccgttttccattaaatactttttgacggcggtattattcgtattattcgatattgaaatcgtatttttttatccgtacgcggtaaacttcagagaattcggaatggaaggattccttgccgttcttacattcgtggcaatctttttcatggcatttttctatgtatggaaaagaggcgctttagattgggataaataagaaattataaattttaaattacaaattttagatggcgattttcgattaaagtttacattaacaataatttagaatctaaaatttaaaatctaaaatctactaaaatgtcagataacaaaccagtaataagaacagatgcacctgctccggaaggatttgaaggagaagggtttttcgcaacgaaactgagcagtgtaatcgggatggcgagaaaattttctctttggccgttaccatttgcaacctcttgttgcggtatcgagtttatggctacgctgaatccaacatacgatgcttcccgatttggtatggaaagaaactctttctctccaagacaggcagatatgttgatggtttgcggaacaatatccaaaaaattaggacctgtcctgaaagaagtgtacacgcagatggcagaaccgaaatgggtagttgcagttggagcctgtgcttccagcggtggtatttttgatacatattctgttttacagggtattgataaaattattccggtagacgtttacgttccgggatgtcctccgagaccggaacagattattgaaggcgtaatgcaggttcaggctttggcggaaagcgaaagcatcagaagaagagatatgcctgaatatcagaaattactagattcttacaacattagcaactaacggaaatgacaaacgaatttgtattagaagcaattacaagagaatttccggagtctgttattgcaagttcagagccttatggaatgttaacgattgaggtaaagaaagaagatctgaaaaaaatcgttcactatctgaaagattcatcattggaaatcaactttcttaccgatgtgtgcggaatccattaccctgagtttccggaaaaggaaatcggcgtggtttatcacctgcacaacatgatgacgaacttcagattacgtctgaaaatattcatgtccagagaaaacatcgaagtagattctttagtggaattatatgcaggagccaactggatggaaagagaaacgtatgatttctacggaatcaaatttaaaggacatccggatctgagacctattttaaatatggaagatcttggttaccacccgatgctgaaagaatatcgtttggaagacggaacaagaacggataagaccgacagcatgttcggaagataaaaaagcgaatggcgccaatggcagcgagccaatagccagaagcaaatagctaaaagcaatcattatgaaagataactcattatctaatatactcaaccagtacgaaagtaaggaacagattgacggacagttatacaccctcaatttaggccccacccaccctgcaacgcacggtattttccagaatatcttaacgatggacggagaaagaatccttcatgcagagcagactgtgggatatatccacagagcatttgagaaaatttctgaaagaagaaactactctcagatcactacccttaccgaccgtatgaattactgttctgcgccgattaacaatttaggttggcatatgacggttgaaaaactgatcggcgttgaagttcctaaacgtgtagactatatgcgtgtcattttaatggagcttgcaaggatcggagatcacctgatctgtaacggtgtaacgggaatggactccggagcaatcaccggtcttacctatatgttcatcgaaagagaacgtatctacgatatgtatgagcagatctgcggcgcgagaatgacgaccaatatgggaagaatcggaggttttgaaagagatttcactccaaaattccatgagttattaaaggatttccttaaaacgttcccgccaagattcaaagaattctgtacattattagaaagaaacagaatctttatggacagaaccatcggagcaggatctatttctgcagaaagagcattaagctacggtttcacaggtccgaatttacgtgcaaccggtgtggattatgacgtaagagttgcgcagccttattcttcttaccaggatttcgactttatcattccggtaggaacttccggagatacctacgaccgtttcatggttcgtcagcaggaaatctgggaatctataaaaatcatcaaacaggcatacgaaaaccttcctgaaggaccattccatgcggatgttccggatttctatcttcctgaaaaggcagatgtttacaagaaaatggaagcactgatttaccatttcaaaattgtaatgggagaaacagatgtaccgaaaggtgaagtatatcatgcagtagaaggcggaaacggagaattaggtttctatcttgtgagtgatggcggaagaagcccttaccgactgcatttcagaagaccttgtttcatctactatcaggcgtatccagaaatgattacaggttctgtaatttcagatgcgatcgttacgatgtgtagtatgaatattattgcgggagaattagacgcataaaattgtaaaaagtatcattgtaaaatgtattcatgattttgcagtgattaaaataaataagtcattagtacattgtacgttgtacaataatacattaaataaaatgagcgaaacaatagcttttaaaccggaaagtttagcacaggtacacaaaatcatcgcaagatatcctgaaggaagacaaaaatctgcccttattcctgtacttcatttggcacagaaagaattcggaggctggttagacgttccggtaatggattatgttgcagaattattgagtatcaaacctatcgaagtttatgaagtagctactttctacaccatgttcaacatgaagccggtaggtaaatatgttctggaggtttgcagaaccggaccttgcatggtttcgggaagtgaaaaaatccttaaccacatccgtacaaaactgaacattaaagacggacagactacggaagacggaatgttcacccttaaacctgctgaatgtttgggagcttgtggatatgctccgatgatgcagcttggaaaatttttccatgaaaatttaacgatagaaaaagtagacgaaatccttgatctttgcagagaaggacagatcgctttagactaacagaaattttaaattctacattttagattttaaattattcacttaacgtttaatcataattaatgcaagaagccaaaagcctattgcaagaagcaaataacaatgagtaaaaaacttttacttaaaaacgcacatattgaaggcatccgctactttgaaacctaccgtaaaaacggaggttatgaagctgctgaaaaagccttaaaaatgactcctgacgaaattcttgaagaagtaaaagcttcagggcttcgtggacgtggtggagcaggattcccaacaggaatgaaatggagcttccttgcaaaaccggaaggtgttccgagacaccttgttgtaaatgccgatgaatctgaaccgggaacgttcaaagacagatatctgatggagtttcttcctcacttactgatcgaaggaatgcttatttcatcatactgtttaggttccaatgtttcttacatctacatccgtggagaatactcatggattcccgatattttggaagaagctattgaagaagcaaaggcagcaggatttttaggtaaaaatattttaggaaccggtttcgattgtgaaatttacgttcagagaggtggtggagcatacatctgcggtgaagaaaccgcattgcttgaatctcttgaaggtaaacgaggaaatccgagactgaaaccgccattcccggctgtaaaaggactttgggaaagaccaactgtagtaaacaacgttgagtctattgcggcagtagttccgatcattgaaattacaggtgctgaatatgctaaaataggagttggaagatctacaggaacaaaattgatttctgcctgtggaaacatcaacaaacccggagtgtatgaaatcgacatgaccattacggttgaagaattcatttactctgaagaatattgcggaggcattaaagacggaaaaagattaaaagcctgtattccgggaggaagctctgttccgattgttccggctaatttattattaaaaaccgtaaacggagaaccaagatacatgaactacgaatctttggctgatggtggatttgctaccggaaccatgatgggttcaggaggattcattgttttggatgaagatcagtgtatcgtggaacataccatgactttagcgagattttacaatcacgaaagttgcggacaatgtacaccttgccgtgaaggaacgggatggatgtacaagattttaaagaaaatcgagaaaggagaaggaaaaatagaagacatcgatctactttgggatatccagagaaaaatcgaaggaaatacaatttgtccgttaggtgatgcagcagcttggcctgttgcagcagctattcgtcacttcagagatgaattcgaatggcacattaaaaaccctgagttatcacaaactcagaactacggattggcacattatgcagatccgattcctgcagttgagaagaatgcttaagatgaaaaaaatattggcagtaggtctaatgatgtcgggttttgttttcggacaggtaaaaaaagatacattagaagaaaaagaatataaactggaggcgactccatacaaagctgaaaaaaaagaaaaacctttacccttaagcaaaaaaggtcaggttttcgttttctacggatggaacagagcggcttacagcaattctgacattcatttctcgggaaacggttatgattttcagttaaataatgtctctgcgaaagacagaccaacgaaattcggaattgtttatttcgatccaagctggtttacagtgacacagtataatttcagacttggttattttattaaagataatttagctttggttttaggaattgatcacatgaaatatgtaatgaaccaggatcagacggttgggttttcaggaaatatttcagatccgaaatatgcagcaatggtacagaacgggcaggtaaatcttgctgatgaaaagttccttacttttgagcatacagacggattgaattatgaaaacgtaggacttgaaaaatacaaaaatctggttcataaaaagaacattgatcttgtttggtcttacggagccggaatcgggtttatgtttccgaaaagtaatgtaaaactttttggtaacgagagaagcgaccgttttcacgttgccggaatgggaaccgatttaagatccagtcttaaccttgtattctggaaaaactggatgctgagagcggaagcgaaagccggatacatcaatatgtgggacattaaaacgacattaaataataaaccggataaagccagacaggattttgttttcggacaggttcttgccggaatcggatatacatttaatacaaaaaagtataattaaaacagagcttaattgctaaggcaaaagcgaaaagcatagaatatgagcgaagaggttaaaaaattcaaaataacgatagacggacagactactgaagttttgccgggtacttctattctggaagctgcaagacaaatcggcggaaaatctgtacctcctgcaatgtgctactacagcaaactggaaaccagtggcggaagatgcagaacctgccttgtggaagtttccaaaggatctgaagcagatccgcgtcctatgccgaaattggtggcaagctgcagaaccaacgttatggatgggatggaagtaaaaaatcttacttctgaaaaagctcaggaaggaagaaaagcagttacggaattccttttggtaaaccatccgttagactgccctatctgtgatcaggcgggagaatgtcatcttcaggatttagggtacgaacacggaaatcttgaaaccagaacggaattcgaaagaaacacatacgaagcagacgatctgggtccgcacatcaaactgaatatgaaccgttgtattctttgtgcaagatgtgtactcgctgcaaaccagttaaccggagaaagagaacacggaattttattcagaggggatcacgctgaaatttcaacctacttaaataaagctttggataatgatttcatcggaaacgtcatcgacgtttgtccggttggagcattaaccgacagaacagcccgtttttcaagcagagtatggtttacaaaaccgatgaatgctacctgcaaatgtgataaatgttccggaaaagccgtagtctggatgaaaggtgatgaaatcgtgagagttaccgcaagaaaagaccagtggggagaagttgaagaatttatctgcgacacctgccgtttcgatagaaaagagctttctgactggaatattgaaggtccgagacacatcgacagacactcagtaatttcattgaaccactatgaaaagcctaaagatgaactaagagttttagataatccgatggcaaaggaaatcagtgaaaaagacgaaaaataagaagttggatgtctgaagatggaagatggaggtttataaccgtaaaatattccgcttctgcttttaactttaaaatcgttaaaaaataaaataaattggtaatgtgatgaagggttgatgccacgatgtgataaacttccagctcccagctcccatcttcaaaacatttaaaataaaaaatggatttacttacatttaaacttatacttgtatttgcgcttttcctgctttcgttaacgattgcagcctactctacctgggcagaaagaaaagtagcttctatcatgcaggacagaattggtcccaacagatcaggacctttcggattgcttcagcctttagccgacggtggaaagtttttctttaaagaagattttacccctgccaatgcagaaaaattccttttcgtactgggtccggctttagtgatgtttatttcgttaatcacaggagctgttattccttggggtaaaagtttaaatattgcaggtacttcttacgatcttcaggtggcaaacattgatgtcggtgtacttttcatcatcggaatggcttccatcggagtttacggaattatgatcggaggttgggcttccaacaacaaatattcattattgggagcgatccgtgcttcttctcagatgatttcttatgaattggcaatgggtttggctttgctttccatcattatgatgacaggaagtttagatttaaaagaaattacggaaagccagacaaacggaaaactgtggggattcattccttgggtttcgggtcttaactggaatattttctaccagccgattgctttcttagtatttattgtagcagctttggcagaaaccaacagacaccctttcgatttaccagagtgtgaatctgaattggtaacaggatattctacggagtattcttccatgaaattaggattgtacatgttcggtgaatacgtgaatatgtttatttcgaatgctttcatggttgttttattcttcggaggttacaattatcccggaattgaatgggttactcagaactggggagaaaatacagccggaattttgagtattgtggcgtttttaattaaaaccatcatcggaattctgatctttatgtggatcagatggacacttccgagattcagatatgaccaattaatgcacttaggatggaaaactctgattccaatggcattggtcaacttattaattacaggtgctgtaattttagcatttggaaattaattaatgtatctaaaccttataggttttaaaaacctataaggtttgtgtatgaatagaatattaaaaattaagataacaggcaagattcgtctaaaatctaatgtctaacatctaacatctataattaaatgaaacttacgaacagatcaaaagttgtttctaataaagaaatgacccttgctgaaaaaatctacttacctgcgatttttacaggaatggggattacatttaagcatgctgtaagaaccgtattgaaaggggctcccgcagtatattcgtatccggaagtacagaaaccgagagcagaaatctggagaggtcagcacgttttgaaaagagacgaggaaggcagagaaagatgtacggcttgcggactttgtgcggtggcatgtcctgcagaagcaattaccatgactgctgcagagagaaccagagaagaaaagcatctttacagagaagaaaaatatgcttcagtatatgaaattaatatgctgagatgtattttctgcggtatgtgtgaagaagcctgtccgaaatctgcgatctatcttaccgacagattggtggacgtggaaaccaacagaggttctttcatttacggaaaagataaattagtagaaaaaataaatgaaaggattgacatcacagaaagacaatccgagaaacaaaaaaatgcggtaaaataatggatcagtttttatttttcttggtggcgtttttagcggtggcaagtgcggtttacttcgtttttgcaagaaatcctctgtacgctgttttgtcattaattgttacaatgttctctattgcgggcatgtacatccttctgaatgcacagttccttgcgattatccagattattgtgtatgccggagcgatcatggtattgttcctttacatactaatgatgcttaaccttaataaacaagacgaaagtaagaagggcaatactttaaaatttgccggagtttttacagcaggacttttgttaattggagttttaggcgttttcagaggtgttcagcagaatcagatcgttgttgaaaatgtagacaacggagttggtttgacgaaaaatctgggaagacttttgtttaatgaatatgttttgccgtttgagcttgcatccatccttattttggcaggtattgtaggtgcggtattaatcggtaaaaaagatctataaaattatgggagaagtaaatacatttatacaaagcgtccctctgaattatttcatcatactttcatcagtactgttctgtttgggagttttgggagtattgctgagaaaaaacgcgattgttattttgggttgtgtagagcttatgctgaattctgtaaaccttttactggctgcgttttctgcatacaaaggtaatggcgacggacaacttttagttttcttcattatggtggttgctgctgcggaagtagcggtaggtctggcaattattgctatgctgtatagaaatacccgttctgttgatgtaagtatatttaataaattaagaggataagaatggaaaatttagtgtatgcaataatacttttaccacttttaggttttcttataaacggacttttcggaaaaaatcttccaaaaatagttgtcggtagtttggctacggcaatggtttttgcatctttctgcatcgcagtaagtattttcatgaattttgattctgaaagccagcctgttatcgtaaaagcttttgaatggttcagagtaaacggagttcagattaatttcggtttccagatcgatcagttatcattaatgatggtgatgatcatcacaggaatcggatctttaattcacctctactctatcggatatatgagccacgataaaggtttctataagtttttcacttatttaaatctattcatattctccatgttactattggtaatgggaagcaactacttaatcttattcatcggatgggaaggtgtaggattgtgttcttatctactgatcggattctggtataccaacgaagagtatggtaaagcagcaagaaaagcgttcatcatgaacagaattggtgaccttgctttattaataggtattttcatgttagcatcacagacgaatgctgtggattatttaacaatcaaagaaaatgcaggaaaatttgaattggacggaacggtaatcattttcattacaacgagtttatttatcggtgctaccggtaaatctgctcaggttccattatatacatggttgccggatgcgatggcgggacctactccggtttcagcgttaattcacgccgcaacgatggtaacggcaggtatttatttagtggtaagatccaacttcttattcactttggcacctaccgttcagggagtaattttattcattggattcttaacggcagctttggcaggattctacgcgcttcgtcagaacgatatcaaaaaagtactggcgtattccaccgtttctcagcttggattcatgttcatcgcattaggtcttggagcttatacaacagcgatgttccacgtaatgacacacgctttcttcaaggcattattgttcttgggagcaggatctgtaatccacgcgatgagcaacgaacaggatatgcgtttcatgggaggtctgaaaaagtacattccgatcacacacgctacattccttatcggaacattggcaatctcaggattccctttgctttcagggatgatttccaaagacgaaattttagtggcggctttcgctaaaaatccggtatactgggtaattttatttgttttagcggctgttacggctacgtatatgttcagattgtattatcttactttccacggagagttcagaggtacagaagaacaaaaacaccacttacacgaaagcccttcgaatatgacattaccattgatcgtattggctgttctttctgttttgggtggattaattaaccttcctcacttcatcggtcacggtcattatgccaaattaatggaatggctgaagccggttcttacagaggaaagctttaaacaaatggaagcaactctttcgggagttccgtttggaactgaaatgatacttttaggagcaacagtagtaatgttcttctgcgtttggttccttgttaaaaatacttatgtgaataagaaaaaacaggcattaccggaacagcagtatacaggatgggaaaaactgtctgctaaaaaattatacattgacgaaatttacaatgcattaattgtaaaaactgttgaaggattaggacgcggaggaaagatgtttgataaaggtattcttgatcgttttgtggacttcgtaggtgaaggagctgaagacagcggaaaagccatgaagcgtatccagaacggaaatgttgagaattacatcttaatcatgtctttggctgtgggaattatactgattgttaactttatattacaataatgtctggtttattattaacactattactattacctctggtaggttcgggattagtttttgcatggaaagataaatccagcaaatatttggcactgggaattgctttggtacaaatgctgattaccttctacatcactgcggattttgattttaatcctacagtagacagcgtattgcagcacgagatcaactatccttggtcacaattcatgaagagctctcttcatttcggaatcgatgggatgagtctgcttcttttattgttaaccaatattctggcgcccatcattattttatcttcttttaatgaaaatgtaagctacagaaatacattctatggtttaattctgttgatgcagtttggtcttgtaggagttttcacttcgctggacggcttgctgttctacattttctgggaagtaactttgattccgatctggtttattgccggaatctggggtcaggaaaataaaagatttgaattcactacgaaattcttcgtttataccttcgttggatcattattcatgttagcaggattgatttatgtatacaatcactctgcctcttttgcgctgacagatttatataatgcacagttaaacgaaacacaacaaaccgttgtattctggtttatcttctttgcttttgcagtgaaattgccggttttccctttccacacgtggcagccggatacgtatacctattcgccaacacaaggttcgatgcttttatcagggatcatgctgaaaatggcgatctatggagttatgcgttatcttttaccgatcactccccttccgattgcaggaatttcgggacagattgtgattatcttagctattgtgggaattgttcacggagctttaatcgcgatcattcagactgatatgaagagaattattgcatattcttctttctctcacgttggattaatggtggcaggtatttttgcttcggcagtaataaccttaagaggaaacttcaatattgaaggtgctgaaggagctttggtacagacttttgctcacggtattaacgttgtaggtttgttctactgctgcgatattttatacaagagatttaaatcaagagacatcagacaaatgggaggtttggcgaaagttgctcctaaatttgcggtgttgttcctgatcattatattaggttcaatgggagttccgttgaccaatggattcatcggggaatttatcctgttgaaatctgtgtacgattttaacggattggcagcagtaattgcaggtcttaccgtaatcctttgtgctgtctatttattgagattctacggaaaagcaatgttcggacagggtgatgaagctgttttaagcacagtaaaagatctttctgcagtagaattctctgtattggcaagtttagcggtttttgtgattgtatttggtattttcccacaaccgataatcgaaatggtgaatagttcgttgaagtttatctaccaatcaatggtaagctaatttgatattttaagaaatgagtgttttaattattgttttcctaacggcagttgttgcgttattttcaggagtttttgaacaagggaaattcgcaagatacattgggattttgggattaatcatcgcattatgggtaagtttcatgccggaatgtgctttctttggacagtacaaacatatgtatgactacaccgccaatactgcgctattcacaaaaatatcaatcgtaacgacattattgttattctttctgggcggttttgcattcagcaaccacagaagccaccagtctgaactgtatgctttaatgcttttcgctctttgtggcgggattatccttttcggatatcagaatatggtaacgctgttcttaggagttgaaatcctttctattcctttatatgtaatggcgggagctaacaaaacagatctgagatccaacgaagcttccatcaagtatttcctgatgggtgcattcgcaacaggtttcctgttattcgggatcgcatttatctacggaagcgtaggaagtttcgatttatataaaattcaggacttcggagtttcaaacccgaaagatgtcatgttcatcttaggcgttcttctgattctttgcgcattggcatttaaagttgctttagcacctttccatatgtggagtccggatgtttactacggagccccttcattaataacggctttcatggcgagtgtggtaaaaatctcaggatttttcgcattattcagattaatgaccataggatttggcggagttacagaaaactggatcaatgttttcggggtattcttaatcatcacattgcttttggcaaacgttatgggattggctcagacgaatgcaaaaagaatgttggcatactcttcagtttctcacgcaggatacatcggtttggtattcttcggaatgacgagcctttctacttacaatttggctttctatctatttgcttacgctttggcgacagtaggagttttcatgtgtctgatttatgttgaaaaactgaaaagagaaacctctttcggagcgttcaaaggattggcaaaaacagaacctttattggcaactactgcatcagtttccatgctttcaatggctggaattcctttaactgcaggtttcatggggaaattctctttattttctcaggcgatgaattctcagcacggagttttccttgttttgatcgctgttttaggttcagcagtttccattgcttactatttaagactgattatttccatgttcttcttcaaagaaagtacatttaaatcttcagaaaaagtaacgatcacgtacaacatcgtaggagtatttgttattgcttcaatcgttgttctgggagttttccctgatctgtttgcaagactgttcggattataaaaaatcttattaaaatagagaaccacaacctttaagttgtggtttttttttacctttactctaaatttcagtttttgtgtcacagctatataaaaaagacactccatttcaggtttttatttcgttcaaaaaatatttggatgtgttggaacacattcgatataatgaccgtttggaataccgagccaattatgctgaatctttaattgaaaagactaaaaatttcaacgaattccgcaacggatttcaggatatttctttgcttgaaaaaaatgaagacctcatcaaacttcttcttgcagacctgttccctaccggacttaccaataacgaaataaaagcggcaagtgttccgctttccaatatcacctttaattatacagaccgtttcaaagcaatattaaaagatgccggaaaagatttcgagatcggattgcgtggtattgatgatgacgaattttatgtcttctgctgctgtcttattttgcagagttacttcaaaaaagatataaaaagtaccattcctttttattatgatattcctaatgcacagggaatcatgaagcattataaaattacggtaaatgcagattttaccgaaatttttcctgctgaaggaacaaaaattccttccgatgaaattctggatatcttgctggaaaatttagatgattttaaactgtggaagaaacattttcagccggaatcatggattttaaaagggttcactattatttcccttgtagactgtaccagtgaaattgccctctccgatcttaaatctaccatgatcgaaatagattctgaaaacttctcgcaggatgaaaaccttgttgaaatattcaaatcgtattttgatattccagagctgaatttcggactgatgctttacaataaaaaagagcagcggctggaaaaaatgccggtgtatgaaaatatgttcaccaatcatgtattgaacttctggatcaatgccattgatgaagatacaagaaaaagtaccatcatcaatcttcattataacccaaaacctattgttgtttcaaaccttaatcatctcgaagaagaagcgaaaatgaaaccttctttcagtatcttaaaggaaaacaacatcaacagttttatggttatcccgatcgtgaaagacaacgagcttttggctatcatggagtttacctctcctatcgcgaacagcttcaatggtcttaaactgaaaaaaatggaatcgttcagcaacatgattattttctcgctgagcagattcagctttgaaaaaaattatcagattgaagccatcattcagcgggaatacaccaccatccacaacagcgtggtttggaaattcagaaatgaagccgaaaaatatttcaacgcttctcttggcaataaaatatactctttaaaagaaatttcatttaaaaaccttaccccgctctttggattttcagacatccgttcttcttcagaaaaacgttttaatttaatgctcgaagatctcaaccaacagattgaatccctttacgagatttttaatttaacccgttcagactcggaaaaatttttaccggctctggatattttcgaaaatgaactaaataatgagataaaagcagacagcgaacagaggtttcagggattactgagagatgaaattcatccttatcttcaggctaagctggaagtaaaatcctcaagtgaagtaaaggcaaaaataaaagattattttgcgcaggtttttagccagaccgatctcttttatacccatagaaaaagcctggatgattcgataacgttagtcaacagaaaactggcagacgttctggatgatgcacagatacaggcacagcagatttttccgcattattatgaaagatttaaatcagacggtgtggagcataatttatataccggacaaaacattgcgccggatcttcattaccatccaaaaattgttaacaaacttcgttactggcagttaaaaaccatctgcaatatggaaattgaattccgaaatttcaaaaaagatcttccggtttgtctcgatattgcttcgctgatttttgtatataatgaaaaaatagacatccgtttcagaatggacgaaaagcgttttgatgtagacggagcctataattcttactatgaaatcattaaaaaacgtctggataaagcccacgtaaaagattcagacgacagaattacctgccccggaaaaataaccatcgtttatttcgggatggaaaatcagagagaatatctggattatatcaacaaactgcaaaagaaaggaattctccaaaacgacatagaattcctgaaagtagaagatttgcagggaattacaggacttttagctttaagagtatctttagtacaataaaaaagctcatccaatcgggtgagctttcctattaagttgatattttatctaaagacttaaaaacgcatacgcaaaagacagaacagaaattacaattcctgccataaaaatctggtacgtaatggataaaagcctgtattttctgtctaaaacctttcctaaaaaatacaaatccttcaccatagaatcgtaaatataatcgcggtctttaataagaacattcattgcatcctgataatcatcaaaaatcatcctgttgaaatttccgaagaataaaagatttacctttctgtcggcaacatcctgtaatctgaattttgctttggtaacattcggttttgtggataaaatggcaaaaatgatggtaagaaccgcagaagccagcaaaataaaacttggaataataagatgagaattcttaggcgtatccagtttcggaaccagaacagaaagacaaactgatatgatgatggcatttacagaaagaagaatattcgctttgctgtcggcaatatcactcagccttgtatgattgcttaaagtcactctgaacagcgtatctacacttctgtcggatttcggctccttttctttcgactttttattttcagaactttcttttttatcctcgtctttttccaacttcttttcaatttttttaatatttttctccttcagaggctgccattcttttttcgcatactctgtataaaactgatgtttgtttttcagcatatccagatttccggcgttccattcgtcgttagaatagcagcgtacattggtaagctcccactcttttctgagagcatcggaaatatcgttataatcgtggcttgcaaaatggctgcaatctgcatctttcactattttttccagaagattctgaggaacgtacgttattttggttgctaaaataagcttcgaaacatcttcgatatagttttccggataattttcctgctgcagaaaatctttcataatctttacccctgcctcttcatgatttttggcacactctatgtaccctgtatcatgaaaccaaagagccagaactactttctcctgatcttcttcagaaacctgagtgtttttaagaatttcttcagccttatttaccgtgaaggtagtatgtataaaattatgataagaatatactgaagatagtttatctttgaataaggtttcgacatagtctttggctttttgtaaaatattcatcaccgaaattttattattgtaaatttatgaatttatcctttaaaactcatttaaaaaatacgtctgttgtcatcagagtagcattgtctgccggagttctctactcctgcgcaacatataacgtaaaaaagggtaaaaacttatctgaaattaaaaattctgatataaaatctgccaccgattttaaaatatttctcgtaggcgatgccggaaatgcagacgaagcacaagctcagaatacattaaatctcttaaaaaatcagcttgaaaaagcagacagcaattcgatgctgatctttttgggcgacaatatctatccttccggaataccaaaagaatctgataaaaattatccactggcaaaacagaaactggaagatcaattatccattgtaaaaaactttaaaggcaaaacactcgttattccgggaaatcatgactggtacaacggattggacggcttaaaagcgcaggaagaactcgtaaaaaattatttaaacgataaaaaagcattccttcctaaaaattcatgcccgattgatgatattaatcttaccaaagacatcaaactaatcgtaatcgacacagagtgggctctggtcaactggaacaactatccgggaattaataaaaactgcgatattaaaacgcgggaagatcttttcacagagtttaaagatttaattaataaaaatcaggacaaaagaattatcgttgcgctgcatcacccgattatcagcaccggaactcatgcaggatatacctctgcaaaatctcatctttttccgctgaaaagtaaaattccggctccgggagttgccagtctcatcaatgtggtaagaagttcatcgggagtaagccctgaagatctcaacaaccagcattatgcagatttagccaacagaataaaaagcattgttcaggaaaaagaaaacatcatttttgtttccgggcacgatcataatttacagtatcatgaattcagaaacatcagacagatcgtaagcggagccggttctaaagtagatcctgcaacaattggcgagaaaacagatttttcttacggaggaagcggttttgcagttctgaatatcagaaaggacaaaagctcggatgtagaatatttttcaacaaaaaacaatgcgctggaaaagctttcgcacattcaggtgatcgataagccgaaagaatttgttaatgattatccgaattcttttccttccacaataacctcaaccatttatcctgaaaaattaacgaaaaaaagaaaattttatacgtggctttggggagaacattaccgaaaatattacggaatgcctattgaagcaccgaccgcaaatatttcaacgcttgacggtggttatactccttttcgtgaaggcggcggaaaccagtctaacagtttaagacttaaagcacaggacggacaggaatttgtgatgagaggcgttaaaaaaagtgccgtgcgttttctgaacaatatggcttttaagaaaagtacattcggaaacgagctcaataatacctttcctgagaaattccttttggatttttatacaaccaatcatccatttacaccatttgccatcggaaatatggcggataagattgatcttttccacagcaatccgcggttgttttacattcctaaacaaaaagctctgggagaatacaatctcaattacggggacgaattttatatggtggaagaacgtttttcatccgatcctaaaacactcgcttcactggataacgcaacggatattctttccacagatgatgtcttaaagaatttcggtaaaaactataaatactcggtagacaaagaaacctacatccgggcaagaatttttgatatgctgatcggcgactgggacagacattctgaccaatggaaatgggcggaatacaaagaaggtgataaggtaatttacaaaccgattgccaaagacagagatcaggctttcagtaaatacgacggagctgcttttaaaatcattatgaatattccggcaatccgccacatgaaaacctttaaagacgatattaaaagtgtaaaatggcttgctatggaaccttatcctctggatttggtattcctgaaaggttctacgcaggaagactggattgcacaggcgaaatacattcagaaacatttatcagataaagatattgatgaaacctttgccaatcttccgaaagaagttcaggatgaaaccattgccgatattcagcgaaaactgaaactgagaaagacaaaattagaaacctacgcctcacaatattatgaggtgcttcaggaaaaagttccacttgccggaacggtgaatcctgataaatttgtgattacaaaaacggcaaataccgttaatgtaaagcaatataaattagacaaaaacaaagaaaatccggaactggttttcgaaaaaacatatgacgattccaaaacaaaggaactctggatctacggtctggaagatgacgacatttatgaagtttccggagacggaagacctaaaatgaacatccgacttatcggaggatataatcacgatacttacaatgttgctaatggaagcaaagtaaagatctacgattttaaatcgcagaaaaacacgtacaatacaaacggtgcgacaaaaaatatttcagacgattacgacatcaatacctacaactataaacatccgaaatacaactttgtagcaggatatccgaatgcagatttcaatccggatgacggagtgattctcggtgcgctggttaattataccgttaataatttcatccgctctccttttactcagaagcacagcctgaaagttaattattatacggcaacaggcggttttaatgcctattataaggggatctttaaaaaagccattggaagctgggattttaatcttgacgcaggatttaccacaccgcgtttcgccgaaaatttcttcggattatccaatgaaagtttttacgataaggaagcagaagacagaagattcaacagggcaagaatttcaaagatcaattttgcaccttccgtttccaagaaaagctggacgaatgttttcaaccagtttcagttgacttttgaaaataataaagtacagcgaaatggcgaccgttttgtagatctttcacccgacgtaagacctgaagttttcgataatcagcagtttgcaggaggaaattacaccttcagctataaaaatctggataacaatgctttcccgactatgggaatggaatttaaagtaaatgcagactggaaaaccaatcttgccgataccaaaagaaattttctgatcttaaaaggaacgctttccatagatcacaggttagacagccgcggaaattttgtttttgccaactccagcaacggaatgtggatcaacaataacaattttgatttttatcaggctgcagccatcggcggaaacaatggaatgagagctttcagaaacgaccgattctcaggaaaatcctattttacgaataactcagagatccgttgggatttcggaagggtaaaaaacaatattgttccggcaaacatgggcgttttactgggatatgacgtcggaagagtgtggaatgacaacgaagactctaaaaaatggcatcagtctgtaggcgcaggattctggctgagtattgtagaaatgttctccgcaagactgaattatttctacggaagcgacggaggaagaatttccggaggtgtgggaatgacgttttaaaaattatacaatcaagataaaaatccgcagaagtttctgcggattttgttattaaagtttacagtaaaatgccagaaaactcttgggagttttatccgtgtagaaatcatattaagagtaggttcagcgttccgtaggaacgctatctttagaacattcattgagaattacagatatcaatcctacggattgattgataaacttattcttatttctacacagattctgctcctaaaggagcaaagcctcttttacttcattataatttgaaagatgcttcgacaggctcagcatgacattcctaataataactgttgttttatggctgtgtcagactgagcttttcaaagtctttatgataaaaacagacaattaaaaatataactaactaaatttgttttcattattgaaatgcgttattgagatcctttcaggatgacatcattctgcatgacattcctaatactaactgttgttttatggctgtgtcaggcagagtctgtcgaagtctttatgataaaaacattatttagatcctttacaggatgacaatcattcagcatgacattgctaatattaaatgttattttgtaacggtgtcagactgagcctgtcgaagtctttttgataaaaacattatttagatcctttgcaggatgacaatcattcagcatgacattactaatactaacttttgttttatggttgtgtcagactgagcctgtcgaagtctttttgataaaaacaggcaattaaaatatagtgttcattattgaaaatgcgttgttgagatcctttcaggatgacatcattctgcatgacgttttatctgtctaaattcatttattttaaactaaactgatacacatttccgccttctttcccatccttttcatcggcgataagtaaagttttatcatcagcaaaaacaacggcttcttttttagaattgtggttgagtgaaactttttcaatcttggtcttgctgaaatcatttgctgaaaaaccggtgaggatctggatatttttatggttcaggagaacaattttatctttcgtgctgttgatggttgcggaagtaatcgccgcatcgctgtatccaccgtcaagtttcagtttcccgatcagttttgctttaaaatctccggctttgttaggaacctgaaaaactaaaaaagtgccgtcgaaacctttgcttctgtttttggtgaaaaggtagaaatttccattcatctctacaaaagcctcacaatcatacagccagttggatttctttggcggaaattccgtctgtccttcgtagtgaaatgttgtggtttgggtaacttttgtggatttttgggaggcatcttttaaatcaacttttaaaatcgataaattctgcctgtcgttttcattatttccaaagtcgccgatgtagatatttccggctgcatctttcgtaatatcttcccagtcgtggttttctgcattttctaccagaacatcactcgtaaggtttccttttcggtctactccgtaaataacgtttttatttccctgatcttcaattgcccagatggtattgttatcctgagacaaagtaataccggaaacttccttaagttttttaggcaaagaaaattcaaccttcagatcatcggttttgggagcttcctgagctttgggattacagctcaacagtaaaaatgacgataaaacgacgatgcgcaacatatttatttttttaattttttaaactgaaaataagagaaccttatatttttctctaatttattaataatctgctgatgatggaggaaaaatcctgccgccaaaccaataagacttccgataatggtatccaataatcttgccttcattaaaatttccacatcatgatgaatttcacttgccgtttccgccagaagaatcgttaaaggcgtgatgaaaaccactgcaaaaccgtagtttcttacaattaacaattcaataataaactgtaaaacggtgatgataacgatcatgacgatcttttcgggattaaaaagaagaatcacccatgccaagccaattccgatgaaagttcccagaattctgtgcatatttctttgtcggacgtgctcaaaattcctgccctgcataatggcgactgccgcaatggaaatccagtaagtgtttttaaattccagaagatgaccgataattaaagtaagtgccataaaaaatccgataatggtgctttctacaaattttgtatatcttcttttgttgaaacttcttctaggtacggttaccactttgcttttttcaataaaaacggagtacagaaaagcgaaggaacaggaaagtatcgctcccattgcaaccagccctactcttgtgggaatcatttccagatcaaacttataggtactcgccattgctgcgaccatgatgaagaaaaaatttcccggcggcggaattttaaaatacgaagaaataaaatgcgccagaaaagaaataacagcaaccgacagcgcggcaaaataaatattaaacccgaaaaaagaacttaccgtaaaagagaaaacaattccgaaagcacagatcgcgagatgaatcattctctgagtaatcggcgcagaagtaaaatataaaatcgttaaagcgcccaaactcgaaagcgcgccgtaattcggttttcctaaaaaatatccgataaaaaggcagcttccgatgcacagcgcggcaagaaaaggaaaatgccatttcctttccgtctgcttaaactccaggagatactgaaatctgttctgcgccgggttctgtaccttcatttactgtaaacgtttagctttttcccacaatacatccatttcttccagagacagatcggcaagattcagattctgttccgaagctaaagtttccattttctgaaaccttgaaatgaatttaagattggttctctcgagtgcagaatcgggattgattcctgaaatccgggcataattgattaatgagaaaaatacatcgcccaattcctgctcttttttatccagatcggtttccgcatgaaactcctgaatttcttcatccacttttttccacgcatcttccgcatcatgaaattcgaaaccgattccttttactttatcctgaattctgtaagcttttaccagactcggcagacttttcggaacgccgcccagaatagatttgttgccttctttcagtttcagtttttcccagttctgttttacttcctcttcgtctttcacttccgtgtctccgtaaatgtgaggatggcggaaaattaatttttcgttcaaagaattaatgacatccgcaatatcgaaactgcctttctcagagcctattttggcataaaaaaccagatgaagcagcacatctcccaattctttttttatttcctgcagatcattctgcaaaatggcatccgaaagttcgtaggtttcttccagcgttaaatggcggagcgattccagcgtctgtttctgatcccacggacatttttcgcgcagatcgtccataatgtctaataatcttccgaaagcttccagtttttcctgtttggtattcataattgagaattcaagtcttacaaatttacgggaaatctttgtgaaagttcttttgtcctgaaataaatgaaggttgtcgttggcttcggctccgctcagccaacggttttactcgttccattatgattcttcgtttttattttacagaccaccatagttggctgagcggagccgaagccaacggtgttgctcatcacattctaattcttcgttttattctacagaccattgcagttggctgagcggagccgaagccaacggttttactcgttccatttttattttaagctttattttacagaccatcatagttggctgagcggagccgaagccaacgttgcggtttcattacattttgcggttggcttcggctccgctcagccaaccttttcccttcatcctttttggcagtttgccacaatcagcggggcggcttccagtaattttatgagctggaagtagggaatgatgatcttcttttccgtgtcacaactaaaatttcccaacgagaaataagctgttgccgacagaaaatcatcgaaatcctgcaaagtgcagactttaaaagcgttctgaaatacgcgcagcggattccggtgttctttctctgaaaggcttattgctgttttgggaaaactgacttccgttgaaattttaaacttcccttttttagcttttttagcgatgtgatgagagacgaaaatgaatgaccgcaacgattgatacaaatagaaaatttcggcgggttcttttgcgattcgggtgtttttctgtactgaaaattgtaccatttcattgagggtttccttcgttgcagcaagatcattgaactggaaaaaggtttccagtaaacttatggcggtatgttttctcgttcctgaccagaatttggcttcgaaatctgtttttttctttttcatgagtctgtttttgggttattggtttctatgaatttcaacagattggattttaataggttggattttcgcaaaggcgcaaaatattcattaaatacagccttattttaagacgcaaggattttatctgcgataaaattaacatcactcctttatcgaaaatctttgattttcttgcgccttaaaagatttgagattaataaaaaactttgcgccttcgcgtttttccaacaagaatattcttatttataaaaaagtttaaacaccaatcctttattgaaaatctttgattttcttgcgccttaaagatttgatatgaataaaaaaactttgcgccttcgcgttttccaacaagaatattcttatttataaaaaagctcaaacaagccttttaaaaatttctaaaatccatttgttttgatggcaaaagtttgccgaatggaacaacagcgcttcccgatctgtagcagagaaaccttctgcattttttaaattcctttcgaaatgaaaataatttggaaaattaaaagaaagccagtacttttaagggtgatttttagcgtacttcggctttcctttaggcgtaaaggaatttcgaagggtaaaggtttttgggtaaaactgtactccgactttctgcttttgcgggcagtctcggtgtagcgctgttgttggttttgcagcagaactccatttattcgggaggggctgaaaacagcagagttgagatcttctttttcatcatctgtgtattttgaaaatttgtacctgaaacctatccaaagaccgcatttttaccgatgaaaaagttcagaactttttgttgtcggcttggaatgcgtcttttcaataggtctttcggggcttttgctaattcgctgatacaaatatataaaaaataaattaaactctactatggtggagtaaaaaaatatgaataaaattttttcatttgaaacaactcagtttgattttgattttatagaacacgtaaaatcattaagaaaatctaataaatggtcacaagaagaacttagtatcagaatgggagtttcaaagacttttgttggaaatgttgaatcttatacacaacatcaaaagtattcaacccgccatatttcattactggcaaaagcattcggctataaaaatatttccgaactcatggacttccccactccgcaacatgaccgaattaaggtaaccgtgaagcaggtttacaacgaaaccggaacaaaggtgatggaaagtgaagtggtgggaattgaggggattgagtgagaagaaaacattttaaacctcaatattatttaaattataatattttatttaatatttacgtaaaaccgtaaatataatgactactaatttcttatatttaaaaacttcttttgatcaaaattgatcaagcatactacataaataatagaaaattagactaatattaaaatcatgtatcactttgacgaattaagtttcgagcaaaaagaaatatataaagaatttaaaaaaatcacaagctcatatcaaattgatcttgaagcttggttaaaaataacaaatgaaaatccatttgtgtggcataccgattcttattttcctgataattatcttaatactgatgatttacaatataaacaaattgaatatcatcaatatatcaatgaattaaaagcaattattaataataaggctagcacggaaagagatatattaaacttggtctccaaagataaatgctttctggctgcagctattttaaaaaaattcactttatttggacatcatgatagatatattttcaaagaatttgaattaccaccacatcatatttgtgattatttagttgttggtaaaaattctgatggttatcattttttattgattgaattcgaaaatatatacaataatataactattggagacggagattttggtacaacaatcagaaaaggtttaaatcaaatagatgattggaaaacttggatagataaaaatttccatacattttctagtaatctgaaaagatttaaaaataaatctcagcctttaccagatgagtttaatgattacgattccacaaggtttttttattgtgtagtcgctggaagaagagatgattacaaagataaaacgtaccgaaaagtaagagaactctttaaacaaaatattatcttaactcactatgataaattgcttgaagaagcaaaatctttaatagaaactggaaattattagaatatcttaagtaatagtaattgagattattataaattaagtttttttatttaaactgtatagcttattttaattaaagaaaatattataacacttttaattatatatatgaataacaaatcgttattattagcaaagattgctgcattgaaaaaaagttttgaaaatattgaatattctggtaactttagaagatgtttaggttctagcttagagccacttttgccaagatatgaaagtttagtttctcaagtaatagttgagtttgacggcgtttatgatgatttgcctcagttatcattacctatttcaatcggatcaccaaatggtaataggctttatcaaaagagtgatgtacagccactaataaataatttagactacattttagaagtatattctaatatgcgaattggagaaaattatgagaaaaaggaaaaatctcatagaatatttattagtcatggaagaagtgaccaatggagaaatcttcaagcatacatagagaaagatttagaatatcagacattggaattagctcagcaagctaatttaggtagaactattttacagaaactctatgaagaagcaaaaaaatgttctttagctgttatagttatgacaggagatgatattactaatgaaaatgagattagagcgagggaaaatgtaatgcatgaaataggcttttttcaaggattctacggattagaaaatgttatacttcttcatgaaagcggagtaaatataccaagtaatatacatggattagtatatataccatttgctaaagatgcgatagaatctacatttggatctttgtatagagaattgaaaattttaacaaataaataattatggcacagtacagtattaaagattttaaaattggtgataaagtttatcacctcagcaatacaactataaaaatggttgcaataggagttcatgaagatataaatgaagttgagtgtcgatggctagataaaaatggcaaaattcaagttctcggcttcctagcagaggaattaggaaaagtagatgatttgtctatacgaatttcatctatatcgatttaataataaatttccatagaaatcttttcttatccaaagtcttttacattgaaatttttacttgtaaatttcaaaaaaacaaacaatgagcaagttctattaaaattgactaagataaagtataagactgacgaatttccttttaaacattctcaaacaaaaaaacctcatcatttctgacgaggttttatattttaaattcaagtaaatgaattatccttgctttctgtgggtgcttttaggagcagattttgcggcagaagtagcttttacttttggtgctgcaggtttttctgcttttggcgcttttttaggcgcttctttttctacgtttacttcttccgttgctgcttcaccttctaaagtttcaggctctgcttttacgaagctttccggcgtaatgtatcctgctttctgaaggatgttgtaccactgcgccagttttttgatgtctgaagcgtatactctttcggtatcgtagtttggaagagaagccgtcatgaattctttcagttcagcatctgttgctttatggtggatcgtttctttgtaatcgtagtttttagcaatattttcaaaaacttcgaacaacggaacttctttatcaaaggtaaacatcgcgatgttatccaacaaacttacctgactggagtttccaatgcttacttttttcttcgtggtaacgtcttcaataataaatccgtttcttaattgagaaactaatttgaaaagtcctggttttcctgaaattgaaattattttttctaacagcataattttattttttgtaaattctgcaatcggcattccgccttttgctatttaatatttttttttattttaattcaaactttattttggaaatctcatcttgtaaccgatgcttacatcaccctgagtaattttagacagttttccttttacaagcttcttcttcaaggcgcttaaatggtctgtaaacaaaattccttctatgtgatcgtactcatgctgaattacgcgggctctaatatcggaaaaagtttctgtatgttttacaaaattttcgtcataatattcgatcacgatggttccttttctttttacatcttctcttacatccggaatagaaagacatccctcgttgaatttccactcttcgccggattcttcaagaattcttgcattaatgaatactttcctgaattctgccagttcatccttaatatcctcataatcttcatcttctgccaaaggacttacgtcgatcacaaaaagacggatatccagtccgatctgtggagcagccaaaccaattccgttggcgctgtacatggtttcgaacatgttgcctatcaattcctgtagctcgggataatctttgtctatatccttccctacttttcttaaaactgggtcaccaaaggctcttatcggtaaaatcatcttgttctttgttctaaaaaattctgcaatatgatggttgcgcttactttatctattaatcctttttcctgtcttttctttttattctttccgctttgggagataaaaaacgaagccattttggaggtaaatctctcgtcgaagcggtgtacttttatcatcggaaattctttctgaaaaacttcgatgaattttaaaatatctgtttccacttcggatacattcccctttaaatctgtcggaagaccgattaccacttcatccacccgattttcaccgaaatatttcgtcagaaaatcaattatcaatgaagtctgcaccgtctccagaccgctcgcaataatctgcatatcatccgttgcagcgatgccgcaacgagcttttccgtagtctattgcaaggatttgtcccataggtttgcaaatttagtaaattttaatgattttattccaaacacagttttttttataaatcaatgttttaatccgctaatttttttataattttaattcttcaaaaacaaaattatgaagaaactcatcctcgtaagacatgcgaaaagcgactggccggaagaaacggaagactttgacagacctttggcagacaagggtttggaagaagcaatgcatatgtcccgattcatgaaaaacaataacgtagcgatcgattactttgtatcgagccccgcagtacgcgcgctgaatacgtgcaaaattttcaaccagacttaccagatcagcattaatacgaatgagaaactttataatccttccgaaagcaatttcgaatccgtaatctacgatctggacgacagccacgaatcggttgccttcttctctcacaacaacggaatttccaattttgcgaattccatttctgaagatattttccattttccaacctgcggtgttgccggtttcgagatcgactgcaattcgtggtcggaattcgacggagccaaaaagaagctgctgtttttctacgatccgggaaaaattaaataaatcgtctgtaaaaattcccctcctttggaggggtggcaaaaattcgaaagaatttttgacggggtggttttagaatgtagataagtaaatttgtgaatggtggatttttggtttaatattcctctattcctatttaattaatttcaaatttaaccttaaatcgagggttcaatgagtttaaagtcagaagtttttaacacataagtcacataagctaaaagataaggtttgcgaatattttagaacactttagtttttaaaaatctttgatttttttctaatatgttctgaatattttcaagggtttaagaatatcttctgtgacttaagtgttaaaaactttttgaacctttataaaaaagcctaaataaacgtaatcaataattttggctaaagcctttctctccacttcaaacaaaaagacgggctaaagcccgtccctattgataatcatattgaatgatttttcctgaattattttcttttcagatccagatcatcaaaatcaaaactgaaatctgtaacgtctgaaatgggttttaatcttgcggattgagcttttccggcttcatcataatcaaaaatgacatacgcatcggcatcgtagcttctgtcgtcccatttgatgatgaaagaattattggaatacgggagaagttctcctttcaggcgtggagaacttttgcatgagattctgtaggtacttccctgctgcgcaatttccacatccccaaaccactggtcgttgtacattcctacaaactgctccggttttggctgtaaatttttatcttttttaaatgtttcagattttgcaaaagcctcttttttctgcttatcaaaactttcctccatttttttcatccggtcgccgtaggttttcagccagttgcggtctgcaattcccagataagaatctttcacggtattggtaatcgtgttgaaagccgctcccgattgctgattcgttaaaacgacaattccaagcttcatatccggaatcagcgtaaactgcgttaccgtcccgatcagtcctcctgtatgctgaacttgtttatgacctttcacatcgcttaaaaaccannnnnnnnnnnnnnnnnnnnnnnnnnnnnnnnnnnnnnnnnnnnnnnnnnnnnnnnnnnnnnnnnnnnnnnnnnnnnnnnnnnnnnnnnnnnnnnnnnnnaaattattcaacaggaattctgcccaggttgtcatgtctttaatattactcatgattcctccggctgcgttggctgtctcgttccagtcgtgaggaacggcgatggcttttccgtctaccggtgcatgagcgtcaattttgttcgcaacagctttggctctgttataacttccgaaactggatgtcatccctacaggtttcataatgcgctgctcgataaattctgcccagcttaaacctgaaactctgtggattacttctccggctacgataaacatgatgttattgtagtctaaagttgttctgaaaggattttcaggctttaaatatcttacgttatgaacgatgtcgtttaccgttagatttccgccttccggaaagaacattaaatctccctgtcccaaacctaatccggctctgtgtgttaccagatctttaatggtaacattctgcgaaacatacggatcgtacatctgaaattccggaatgtattttgaaactctatcgtcccaattcagttttccttcgtctgctaaaatggcaagtgccgtacaggtaaagcctttggaattggaggcgattccaaccaatgtagtatcgtccatcggttgtttggaagttaaagaacctaccccaaaacctttggaataaattacttttccgtctttgatgacaccaaccgacattcccggaacatcgaaagtttttaaagtgttctggaccaattcatccagttttttctcttcaacctgcgcattcgcaatcccaaccgataaaagaagaaggaaaaaagaaagtttctgcttcatttttaatttttttcaaatgtagtaaataatgcggtttaaaattttcatattttattcaataagaattatgataagtaaagttttcattttaagtttaacttattcaagaattcaaagagataagccgtagctatgatctctaagataaattataaagttagagtccgttcacaattcgtgaaaacggactcctaattaacttccttttgataaaactaattttaactttctaatgaattattatcctttttaaacgcttcaatcatttgttctcttttttcttttgaaagatttattctttccggataaggattacttttaaactcttctttctttttgatgtactgatctcgagttacaggaacacctttttgaaaaggttttatttctacccttttcttctcaataccaattgctttaaaagagtgatattttttttcatctccaacttctaaaattaaacctgctaatcctttaaacctataaggaccgtcagaaattggaatttcttttgtataccatgctgtatagattcttccattaaaaactgttgtcccttttcgacaagaatagccgagaattatttttgtatcgttataatctgttttccatttcaaataagtattttcaaatgtgaaaaaatctcgagaaatgctacctgtaacaaatatttttgatccttctctaaaaacagaatatccaactttatattttggtaaatctgttgatttaatttccacatttgccgaagtttgagctgctaaagctgctttagccataatttctcttgcagctaaatattgctggctaaaatatattgaagaattagaatttacatctaatatcataatctctttcaaacgatgagttggatctacatctgttgtatctcgaacaaaagaataatcatagtgaacttctaaatcagaaaaattcttttcatcttgtctttgagataaaacaaaagaaaaagagaagattaaaacagctaaaaagtatttatacatatattaaaagtttatattttaattatggccagaaacctgccattaaagggttctcaaaaggagaagcacattcatcttccatttgttgtaaatctgttaaccaacaatcaggctgatcatttggtcctacttcaacatattgggtataaccacaagaagaagtaagcttaattggatgataatagatttttgattcagacttaacttctacattagaagttttagcacctaatactcctgcaacaccaaaggctgccaataaaaaaattctcttcatttgttcttagaattttgaaattaataatttttttgtaacaccaaaagtatttcgcgaaacttttttcaaatataaaatctaattctctagctacctattccaaacagaataaaatagaattccatttggaataaaattattttgctaaaaacattatctttacagctcaattactataattatgaatcacggtattggttttaaaataaaaagattgcgagaacaaaaagaaatatcacaagaggatttggcttttcagcttaaagtttctcaaagttatcttagtaaaattgaaaatggtactattgaaaaactggattttattttcatgcaaagggttgctgattattttaaagtagagccaaaatattttttagaagatcaaatcgttcagaacaattctgataataaccataattctgctgttgggaatatttatagtactgtaactatcaacaataatattgatgaagacttatttaaaactatcatgcaaaaccatgaacaaataagtcaactcatggaaatgcagaataaactgatagaaaaaatgttgaaagaaaaatagagagaagcattctcgggcagagaatatctaaaccaaaacagattcttactttctcatcttgagaaaattcaacttaaaaaagaaacacaccgtctcgctccgagaaagtttaaacccaaactgtttggctccgtcttgaagcgagaaaatgccaaacaaaaaagaatgataaattcagatagctaaaactagtgaacttccaaaagattcttcatttcataatgcttcgcaaaatttcattctgaatgacagttctgaaactaaaattacaagttggtttaaactaattttaaaatcctgcaaaaagaaaaatctttgattttttcaacttatgtgctctctttttccatttaagtagtaaacttaaacaactaaagtgttaaaatcttttgcatcttttgtggtaaaaaaagagtaaacaaatttatattaatgaatgtcattacaagcctcaaagaataacaataacattaaagatgtttataaatcctaagaaaaaataatttcaaatcttatctttgcagagaattttaaataatgacgaaaatcctactcctttccgactctcattcttatattgacgaccgtattttagaatatgcaggtcaggcggatgaaatctggcatggcggagatttcggaagtatggatgtaattgagcagcttgaaaagataaaaccgctgaaaggagtttacggaaatatcgacaatgcgaaaatccgttccgagtttccggaagtgagtcgttttatgtgcgaaaatgtagaagttttgatgatccacatcggtggttatcccggaaaatatacgcctttggcaaagcaggagattgctgaaaaagttccgaaactatttatttcgggacattcgcatattctgaaggcgatgtttgatgaaaaaaacaatcttctccacctgaatcccggagcgttcggaaaacagggatggcataaaatgcgaacgatgatgcgttttgtaatcgatgatacggaaataaaggatttggaggttattgaattgggaccgaagttttaaaataatttttaaaccattaagaaaaaaattgaggagttaagaataataagagattgcttcattcctcgcaatgacagtactatgaaaataggcgataaagtttctgtagtagatgaaaatttaagcggggtggtaacttccgtgaagggaaatatcgtggtttttaaagatgaatacggttttacgcatcaatatccaaaggagaaactggttccgaaaatttcggatttttatgaaaatactcctattataaaaaaagcagagccaaaaaaggtaatttccaaagcacatcagaaaaatcatttggttcttgatcttcattttcataatttagttaaaaatccaaatgattacaccagttttgaaagacttttcatccagaaggaaagattggtggaaaccatcaacttttgcagaaaacacaatctgaaaaggctggaaatcgtacacggaatcggagacggagttttgcagaaaatggttttcgatacattggaaagccagacaaatgtggatttttataataaggaaatacttcatcatcaatcgggtgcggtaatggtagaatttcactaaatttgcaggaatcaaattatgaatatacttaatttactttttaccaaagacgggttaatctaccagattgctaaaaataaaagcattgtggaagagaaatcgtatttcgtggatgaagaatctccggaaaactttatttcggatatgctggataaagttcttcttctgcagagatttgatgagatccatgtgatttccgcactcaatcatttcacactgatgccggaaggtttttcggagcatgaagccggattcgatcttatcgccttcaacgctcctgtggataaagagaaagaagaactgatgctttcgattaatgaaaagtttaaaattcagttttattatacattcccgaagcatttttacaaaaagattaaagaactcgcgctgcctgttcagtttaatttttccggtgaaaagtttttaaattctattaataacaaaaacagcaaagaaattcacatcaacctgtatcataaccaatgtgagtttttcgcgatagacaacaaaaaaattattttatacaacaatctggatgttaattctgaggtcgattttctttatttcgtgatgtttacgttaagcaaaatcggtttcggaatcaatgaaaccaatttctacgcgtacggagaaactactgagaatgaaacgtttatttcagagcttcagaaattcgtaaagaatctgaaaattgtatttgataatattccttctaaaaattttatattaaattaggttgcagaagatcagatagcaggttttagtttatctgcaatcttttacctacaatctaaaacctatcaattatgtacagaatcatatccggcaaatggaaagccaagaaaatcgccgctccgaagaattttgatgtaagaccgactacggattttgccaaagaagcacttttcagtattctggaaaacacctacgatatgcagtcggtttcagtactggatctttttgcgggaatcggttctatttcgtttgaatttgcctcaagaggatgtcaggatattacgtccgtagaaatgaatccgaaacatacgtcttttcttaattctaccgcttctgaacttggattcagtctgcaggtgaatgttcagcggggcgatgttttcgactggctgaagaaattcagaaacaaaaaatcttttgaaatcgttttttccgatgctcctttcgaaatggaagaaaagaaatatcaggaaattatttctctggttttaaacaataaatacctgaaggaaaacggaattcttgtgatagaacaccaaagccgaatgaaatttgatcatccgaatttaatcgatacccgaaaatacggaaatgtaagtttcagtttttttgaaccgaataaggaagaaactacagaaatacagaatcaggaataattttcctgattttttgttttaaacaatttttactttttcagaagaaacaaccgcactttcgccccattttgcaatttcttttaaaagaggaagcaacgttttcccgaaatccgttaaggtgtattctaccattaaaggcggtttctctgtgtacacctttctgtcgataatatgatcttcttcaagctgttttagctgtaaacttaacgttctttctgtaattgtgggaattaattttcttagctcgttgtatctttttgccccatcaatcagataaaacaaaatcacggctttccattttccgccgataaatctcatggtaaccgttgtacagcacggatattctttattatctatggaatacatttttttcatactatcattttagaccgttattgcaaatatatcaaacgtacattaattttgcaactataaaaaatatagtataaaaattatgagctttttagaaaaaataaaatcgagatataccgtaaaaaagtataatcctcaaggtacaataagtgaagagcagattcagcagcttaaagaaattctgcatttaagtccatcttccattaacagtcagccatggaattttgtgtttgtatcggaaccggaaacaaaaatacagcttgccgaagcctcttattttaacaaagaaaaagtattggacggaagtcaccttatcgtttttcaggcacttaaaaaccctgaagattttgaaaagcagatagaagaaaatcttccggaaggttcggtaacttattataaaacttttgtaaaaccgaaaggagaggccgagatcagatcgtggctgaaacatcaggtttatctttcattgggcgttttgctttctgcgtgtgcagatatgggaatagattctactccgatggaaggaattgaaactgaaaaatatgatgcaattttaaagaatgaaaagtacgaaagtgtttttgcagtagttattggagtaaagtctgaagaagataaaaatcagccggttcataccccgaaaagaagactggaaagacagcacgtaattttggaaatttaatttatttaaatgcaaagattaatataatccccgaaattatttaagagagcaaagagtggcgacaaagtcgcttatgaagtatgctttataaaatcaattttcaattgattaattcttagcttactaaaaataaactttgaaaaataaatctttgcgttaaagaatcttctatagaaaaagctgtttcaaattgagacagcttttgttttttataatacttttaattccaaatcgatggttttcccgaagaatttcttcgatattttttcgaaatttttcgttaaatccgaaagatagaaatggtaattcggttttggattctgctcattcagcagatgatacttatccagaatgatttttaaatgattggcgacaatattcggagaatcaatcacacggacacgatttccgtaatattgcttgatttcatctatcagcaacggataatgcgtacaacctaaaattaaagtctcaatattctttaatttactattgcttaagtaattgtagataattgcgtgggtaatcgggtgatttttaaaaccttcctcaatagcaggaaccaataaaggtgttgccagttcatccaccttgatccatttattgtgctttctgatgctttttttatacaatcccgaattcacagtagctttcgttgcaatgacacccacattattatggatttcataggaaactttttctgcaaccggattaattacgtcaatcacaggaacttttcctgcaacagactgcatcacttcattcagcgcatttgccgttgccgtattgcaggcaataacaatggctttacagttttgctccaacagaaaattggtgatctttgtagaatattcgataatcgcttccttcgatttttcaccatacggaagatgtttggtatcgccgaaatagatcagatcttcgttcggaagaagtctttttatttctttggcaaccgtaagtccgcccactccgctatcgaaaattccgataggctgttttggggaaagatgcgaataatcctgctttttagttttcaaaattgagctgaaattttatacaaaaatagtgaaattgttggatgcagaagatggatgttacaagtttttcacaaaccgttcttccgactcccgactttagatttccatcttagacgatgaacagatccgaagcaattccgtctgccataaaccagtgtttttccggaattttcaggtggttattttctgttaccagaattccttcttcaagctttggtttgatttcattctgaaaatgttctaaaatactgtcattaaatttttcctttaagcttcccagatcaacgccccatattgttcgcaagccaatcatgatcatttcattaaactgatcgttttgagaaagaaattcctcttctttagccagaagatttgaatttaattttttgatatactgctgattgttcgcgacattccagcttctgacatcaaatccgttataagaatgagcagaaggaccaattcccagatattctttatacttccagtaggaagaattgtgtcttgagtaaaattccggtttcgcaaaattggaaacttcataatgctcaaaaccattatctttcagaaaatccgataagtagtaaaattctctgttctgttcttcttccttcgggctttttacttttccttttgagatccagttttccaaagcagttttcggctcaaccgttaaagcataagaagaaatgtgcggaacttcaagcgcaatggttttatttaaattctctttccagatttccagattggaagttggcgaaccgtaaattaaatcaatgcttaaattttcaaaaccaaaatcctgcgctcttttgatggaatcttcggcttcgtttgcagtgtgtgcccgattcattaatttcagatcttcttcaaaaaaactttgggtcccgattgataatctgtttatcggagattccgacagtcctttcaggaagtttttatccaaatcatcgggattcgcttctaaagtgatttcgatattcttttcaaaagtaaaatgttttaatacctcatcaattaaagatttaatttcatccggcgaaagaatggaaggcgttccgccaccaaaatagagtgactgtaagtttttgttttgcaattcatcttttcggagaaagatttctttcttcatcgcagccagcatttcatccttaaaattcaaagatgtagaaaagtggaaattgcagtagctgcacttttgcctgcaaaacggaatgtgaatgtaaatcataaaaaaagccctgaaaaaattcagagctcaaatttatttaaattaaatcaattaatatctataacctctgtggttaatgaagttatcgaagttatatcctaacccgatcatgaagctgtttcctccatattcctgaatatcagacaaacctaagttgtaagtagctccaatcatgaatttgttgaatcttacttttacaaccggagcgatttgtaactgctgactgtcgaatctgttctgaacagatctgtagcttaccccgaaagagaatgcattgatatcgttaaagaacgttgccattaagttataatcaatcgttcttgtagagtttgtgttcaggttgattaaagctgaaggtgtgaaatagatgttatcacctacatgccagtcataccctaagtttaagaagaacttaattggagaaggctcacgtccgtttacgatcgcttcatcgttggtaagtgcgatatcgttaactgaaactccagcgaaaatatttttgtaagttgcctgtgctccgaagtttgcataagccatgaagatattactttcacttccctgcaataatggatctgaagcatcctgcgtattaatctttgaataatcaaaattcatattgtagaagctaacgcttgtaccgaaagagaactgatcttttctgtctccgtcgctgctaagaggaataaaatatgaagcacccgctgtaataccacctgcagaaatagggccgttgctgtctctgaatacagataaacctgctcccactctatcaaaaatgttcgcgttgatccctaccgactgaacgtttggagactcactgaacttcgaaaattgctgctgatagttaagattaagctgcacatagtcggtctttccgtattgtgccgggttgaacaaaaactcaccgtctaaaagatattgttgatagtacggtaaagtttcttgtgctttgtatgcatttgacaaaagagctaaacatacgatagcatatagttttctcataacaaatcttgatttcaattcaacaaatataaaaaaattctcaatatatttttagttttctaaataatttctccatttttttacagcatccgccatatctttcggcattgggctttcaaaatataattccttcttggtagtgggatgtataaatcctaaagtatgggcatgaagcgcgtgtctgggtaaaatctcaaagacattttttataaactgcttatacttaggaagattcactccacggagaggcgtatgtccttcatatctttcatcattaaacagcgtatgaccaatatgtttgaaatgtgctctgatctgatgggttcttcccgtctccagcttacattctacccaggtcatgtatttaaatctttctaaaaccttgtaatgcgttacagcatgctttccctggcttccgtcttcataggtgtgcatctgcatcctgtttttcgggtgacgcccgatatggcctcttattgtaccttcatcattctgtacatttccccaaacgaatgcccaatacaatcttttggtttttctgtcgaagaattgctttgccagaaagctgagtgcatattcatttttagcaataaccaataatccggaagtgtccttatcaattctgtgcaccagccctaccctgtcgagatcagatttttcgccattctgctcgaaatgatacgccaaagcatttaccaaagttccgtcccagttcccgaatcccggatgcactaccattcccggatctttatctacaacgataagatcatcatcttcgtatacaatattgataggaatattttgcggaatgataacattttcccgtggagggtgcgccagaagcaccgaaacctgatctcccggttttacgcgataattctgttttaccgcaacaccgtttacaataacatttcccgctctgcaggtctgtgaaattttatttctggaagaattctgacggaaaatcaacagaaacttgtcgatcctcaacggttcctgacttttgtctaccgtgatgttaaggtgttcatatagtcctttattttcctcatcaatatcaagattatcgatactgttctgatctaataattcttcgtccaaaaaatcttcgttatcttctgccattgttttatcttttatacaaaaggcttcaacataatgaaagttgaagcctgtattctttataatatttacttttttattctacaacaacctttttagctttcggcttttctgcaggttttgcaggagaggttgcagcaggtttatttgctgatgtattattaccagaactactacctgtattggaagtagtagtttttggtttattttcggttactgatgttgttgattttactgtacttttagaagcatctgtctttatcgcatctgtggatggtttaggattttctcttctcggagttacaggtggtggcggaatatcctgtgacggttcctgacgcgaaggcatttcctgatactggatcggaggcagagcggtgtctactttcattctgtaggtagaattcagttgttcgatttttgcactcagttcagccagtgttttcttacttgcccaaagatcgatctgcattccctgatcccgaacatctccggctgcaggatcctgataatagataacatcggattcgtccttgcttccgtcttcatgatccacaagacctacttcaaacatacttctcgctataacctgtctcgcttccttcaccgttaatcccactacattaggaatcgcaatatttctcattggtccggaacctatcacgacatccaccacagagaatcttgccagttttgttttcggttttacttcatttccgttaaataatatacggatcacagcatctttctgaatgcttggctcatagatggtatctccgaccttcagacccacttgttccagacgctggaaagcaagacctgaatatttattgattacatccggaacctcaactttagcccaggttcttggatttactcttaactgaattgctcttccgtcttttacacgggaacccggaaccggatacacctgcaaaacctgaaaaggtctgtatttaggatcataattaaaactgtccacttcatattccaatcccgaatcatccaatattttgatggcttcctgtacagatttgttaacgatatttggaacgggaatttcctgaccatgattggtatgatattctaaccaacgaaacgtaagccaaaccaaccccacaaaaacaccgatggctacgactaagttcagtaaaactttccaattgaaaagtgatttaagcatacttaaaatgactataattagacagcaaatataactaataattttagaatgtgcttttaatttaacacatttcacttttgattttaaaatttcaggttttaggtttacgcgttgtataaaatcattaaatttgccttaattgatactaaacaaaaatgagcaaaaaacaagttgccgtagtgatgggaggctattcagacgaatatgttgtatcattgaaaagcggacaattaatctacgattctttagacagaaatctttacgatgtatataaagtagttatcctgaaagatgaatggtattttttaggcgaaaatgagcagaaatcccccattaacagaggagatttttctgtgactttacatgataatgaaacattgaaatttgatgtctgcttcaatatcatccatggaacaccgggcgaaaacggaattcttcaggcatactgggacgcgatcggacagaaatatacgggatgtgatttttatcagagcgctttaacattcaataaaaaagatactttagcggtactttcaaaatacggaattccttctgcgaagagtgtttatttaagaaaaggagaagaaattaaggttgatgaaattatagaaactcttggtttgcctgttttcgtcaaacccaatcagtcgggatcctctttggggatttctaaagtaaaagaaaaggctgaattccttgctgccactgaaattgctttcaaagaagatgatgaaatattaattgaaagttttcttgacggaatggaagtttccgtaggagtaatcgattataagggagaaacaattgttctgggaattacagaaatcgttcctaccaacgaatttttcgattatgaagccaaatatgaaggggcttctgaggaaattacgcctgcaagaatcgacgatgaaacaagaatccgtgtagaagaaatcgcaaaaagagcttacaattctcttgggatgagtggtttctcaagaagtgaatatattctgatggacggaattccttatatgctggaaatgaataccaatccgggattttctcctgcaagtattcttccgcagcaggcaaaaatctacggaatttctattacagatctttgcggaaacgaggttgaaaaagcattacaaaaaaattaaaaggatggaagattgaggctgcaagtttatcactctacatttctaccctcatcattcataatttataacttataaatttatacgcatgaaaattgctgtttttccggggtcattcgatccgatcactttaggacattacgatatcattgagagagcggcaccgctttttgataaactgattattgctatcgggcagaattcccagaaaaaatatatgtttccgcttgaaaaaagaatggaattcatccaaaactcagttgcggaattcccaaacgtagaagtagattattttgaaggattaaccgttgattactgcttcgaaaaaaatgcacaatacatcatcagaggtttaagaaatcctgccgattttgagtttgaaaaagcaattgcccacaccaacagaactttagcgcacaaaaaactggaaacggtatttttgttaacgtcttcaggaaagtctttcatcagcagcagcattgtaagagaaatcatcaatcacggcggagaatatgagctcttggttccggattcggtgagagtgcaattataagtaatgagtaatgggtaatgagtaatttttacaactatggattttaatcagttatttaaagatcgaactaaagatttttcgatttcgattattaaatcgttatcaccattaccttattctgatgatctttcagtaataagaaaacaaattataagatcagcaacttctgtagctgctaattacagagcagttgcgagagcaagatccgaaaaagaaagatttgctaaaatttgcattgttgtagaagaaattgatgaaactcaattctggttagaaataattgatgagctggaatatttagatccaggaaaaatctcaaatttaagatcagaaggtgatgaattggtaaaagtaatgactgcttataaatttaaattatctcaaaatacaacactataatcatattacttattaccaattactcattacccataaaacatgcacgaacagttcaattttgccatagaagttttgggaacgatatcattttcgatgtcgggaagttttgcggcgatgcaaaagcggctcgatcctttcggcgtgctgattattgcttttgtaacttctgttggcggtggaaccgtgagagaccttctgcttgatattccggttttctggatgcatgatttacttacgtgcgcattgattatcctgaccagtattttcaccatgatttttaaatcttttgaaaaaaactttcgggttactttatttatttttgacagttttggattaggattgtttaccattattggtgttcagaagggtttaaatgcagatattcatccattaatctgtatcgggttgggaacaattacaggttgtttcggtggaattatccgggatatattgctcaacagaattcctttaattttcaggaaagaaatttatgcaaccgcctgtattgtgggaggttcagcttttttactgctgacaaaatttacgactttaacgtatactatcgttcagatttttacgattcttctaattgtttccataagaactttagccgtgaaatatcattggcagatcccgaaattttatgggtatgagaataactctgagatgtaactggcgatttatttggctgaagccgtcaacttcgcacccaaaagccgggctaaagcccgttcctattgataacaaaaaagcacctaaaaaattagatgcttttatttttgatttggttattcattaaaagaatttccctctgtttctcatattcgggttatgcatatgtttctgcatcgttggcattttcaattgctctttcatcatcttgatctggtcggtcatcattcctgcgctgtctaatcgttttgcttcgtccagaagtttctgcccttcctgttttcttcctttagaaattgctgctgctgcaagatttaaagttgccatagctctgtcatgcttcatgttaagaccatattccaaagcttttttcatgaaaggttccacttttgtaggatgatcctgagcttgagttaatcccattaaatagtgaaaatatccatactgcgttttatgaagctgggttttgtaatctgtgatatttttaagccactctcctgctttttccatgttttgctttcttaattgccagaaagccaaaagaatatattcatttttaaagaaaagcagaataggtgctgcagccagaaggaacacaacgattccccagcctaagtttctcgtaaagaacatcatatacagtcctaaaagaataagaaccgccgcaactgcaatttttatatatttattcattattaaattttagaagtgcaaagataagaaatttaagattcaaagtttaaggttcagcgtctaaagttttgtattaaatcctgagcttagaactttaaacattaaattctttcaaacgtttgaaaacagaaatcatactgatttttttcgtctttctcatggcagatttcgtctgtttttttccatatcttcgaatcgatctttggaaagaaagtatctgcttcaagatctgcttttaccaaagttacttccagtttatcaacgacatccatggtctgttcatagatttttccgcctccgatgatgaaaacttcttcgtcaatttttttagcgaattttacggcttctttaatgcttccgacgattaaaataccttcttcgaaccagtcggtctttctggacacaacaatattggtacggttgggaagcggtttcccgatactttcatatgtctttctccccatgatcaccggatgcccggaagtgatttctttaaagtgtttcagatctttcggaagatgccaaagcaactgattttcaaaaccaatttcgttcttctctcccattgccaccacaattgttgtcattaaaataaatttttacaaaattagcacataatttgtatatttggttagcacaaaacatattaaaaaaattcaaactatgaaaaataaaggttgtctgagcgcaggaactattggtatcgctcttcttattattgtcgcagttattttcttctggggcaaaaacggctacaacagctttgtagacaaagaacagacggttaatgcaaaatggtctaacgtagaaacagtttatcagaaaagagcaaatcttatcccgaatcttgaaagaacggtaaaatcttattccaaattcgagcaggaaaccttaacgaaagttgttgaggcacgttctaaagcaacttccatcaatattgatcctaccaatatgaccgagcaggatgttgccagatttcaggctgcacagggagaattatccggagctttaagcagattgatggcagtggtggaatcttatcctaatttaaaagcagatcagcaatacattaatttccagagagaatatatcgcgatagagaacagcatcagaacagaaactgtttactacaatgatgcagcaaaagattataatgtttctataaagcaattcccgaataatattctggcgaatttcaccaactttaaagaaaaacctttgttcaaagcggaagcaggagcagaaaaggcacctgaagtattctcagaataatggcaaccagtttcttaacaaatcagcagatagcttcccttgtggaagctattcagtcagcagaagaacattctaccggcgagatcagagtgcatatcgattcaaatacggatgaagacaatgccaaaattgctttcaaagtttttgaagagttatgtctgaacaaaaccaaagaaaaaaatgcggtgctttttcatgtcaatttcgaacagaaatatcttaccatcataggagatacaggaattcatgcaaaagtaagccaatcttactgggatcatctgcacgactatattacgtctgaatttgccaaaggaaattattatcaggctttaaaaagcggaattctggaaaccggtctggaacttaaaaaatattttcccgtaacgggagaaaaccacaacgaacttcctaatgaaattacgttctcttaaaatagttttttcatttttactggtatgcttttacacttttgtatcggcacaatataccattccccctaaaccggatgttctgtatcctgtttatgatgatgccaatcttctaaagaaggaggaaaaagatgcgcttaataaaaaactgatcgcatttgcagattctacctctacagagattgaagtggttattattccttccacaaaaggagaagacattaattttctggcaacgatgtttggcgagaaatggggcatcggaaaaaaagatgtggataacggaattgtttttcttattgcaaccgaagaccacaccatgtctatccaacagggaagagcggtggagcaatatttaacggcatctgttgcaggacagattttggactacatcgttactcctcactttaaacagggagaatggtacgaaggtatcaacggcggtacatcggcaattatggaagctgttcaggggaaatttaaacctttgaacaaccgtgaaagcggagatggagacggaagtatttttaaaattatcatcattgcatttgttatcttcattattattgccattcttttcggaaacaaaggaggaggaaaaggcggcggaaattatgacgacgacgatgtgatcctttccagaagaggtcgcagaaattatccgggtggatttttcccttttccgggcagctttggcggcggtggatttggtggtggaagttccggcggaggaggaggcggttttggcggcttcggaggaggcggaagtttcggaggcggtggtgcttcaggaggatggtagaattttattactgctttaaatttactcagtttttaaattgaaataaacatatacaataaataatcggtcattttttgatcgattttttttatcataagagtctgtttaaatttttttgaaggaatgatacaatttttataaagtattcattctttctgtagtaaacctcacttttttgtgatataaaatattaggtaatacacaagttttttcttcataaaagaggtgatacttttgcagctgataaaaaatatttttatgagaaaaactttaaggctcgctcctgcagcaatgcttcttttaggggtactttcatgtagtacaaatgaaattttggaggaaacaaatgaaagtccaaatcttagcaaatctgcaaaatcattatcagcaaagtatacttcggaatacagctatcttggttcaggatacgacgtaacgaaaagttatgctgttgaaagttccacaggtaatcaggtaatagatgtttaccaactcgttaatgacattgagagtacaccgactcctttccaggattataaggaaaattatggtgagaatgcatacgaatatgcaaaaaatgtaacaaccaaagtagatttaggtggaacattttcattatttaagcaatccataaccgcttctttcaatggatctttaacaagcaataataaatttgatgggaaatacatctatgggagttatcatcttttaattaaacaaaaaaggtataaattcaaaactcctacagctagtaatttaaaaaactatttaacccctcaatttactcaggcagtacagaccatgactccgcaagaaattgtacagtattatgggacacacatccttacagatatttatacaggaggaaagcttgatgtaatgtttcgttccgaaaccacaaatgaaaacagaaaaaatgcttctgaagtgggagtgaaagtaagtgcattaaacatatttaatatcaatgttaacaataatgtcgatacgtcttctgcatccaagaactttaacagaacgttatcttacagatcttacggaggagatccgacaaaatctttattaggaaccataagtatggatcaatctactcccagtgtaaacattgctaactggcaaagttcatgtacacctgaaaattctgtatttgtagatattgctgagcagggagtgctgaaattatatgatcttgtagatgatcctattaaaaaagcgtctttaaaagcttacatcgatcagtatttaattgataaccaagttcagatggaatatgttccaatcgatatccacagatattacaatcaaagtacgacagatcatttttatacgaaaactgccggagcctatggcggatacggatatgaaggcgtagacttcagagcatataattacaaggcaccaagcacagttccaatctatagatattggaatggaactgatcattactatacaacagcacctggagctcctgctggttacatatcagaaggcatagaattttatgcttatccatcacaggtaagtggaagtcgcccggtctatcaatatttcggaagaaagagaggagatcattattatacaacttcttttcagtcatattctaattataattacgaaggaattgctttttatgccctgtaaaaaagtttttatgtcttaatagaaaagacaattcgtaacgtatacagtaaatataaatcggtcaaatgaccgattttttttgtaaaaatttgtaatcatttattaaatgctttgaactatatttttaaatattttaaacgttaaaataagtattacaaaaaaataatttttcagtaattaataataatttataataacataaatcatcaattttaatattaaaaattaataaacccggctaatttctgtttttacttcaaaaatttttcattatatttacgtaaaacaggtttatgaagaagacgttggtagtttttgcgcatccttatttagagcactcaaactcgaatgcagagctcattaatttctatgttcgtcatcagcattttacgcttcgggatatttatgaagagtatcctaattttcatattgccgctttcagggaaagaaaaagaataaaaaactatgaccgttttattttccagtttccactcatctggttcggaatgccgcctttgttaaaactctggattgatgaagttttcgaccgcgactggcttaaagaagatcatcacaatcctttggagggaaaagaggtttacattttggtaaccacaggcggaaaagaaagatcgttcagcaaggaaggaacctatcagtttaccgtagaggagctgatcagcggacttatcgtatcgctgaatgtttttaaggcaaacatcaaaaatatcaaaatcgtttacgaagccaacaagctctcaaaaaaagaaattatcgtacacaaacagcagtttgtagaacttctcaaccaataaaaattttatggaaacaagcttagcaatgaacacacttattttcttaggcgtagccatcattatggttccgctggcgagaaaattcgggctaagttctgtcatcgggtatattgcaggcggaattatcattggtccttatgttttaaaattaacgggaaaagatgtcaacgacattatgcacgccagtgaatttggggtcatcatgcttttgtttttagtcggtctggagcttgagccccgaaaattctgggatatgcggaagaaaattgtcggactcggcttaacgcagatgcttttaacgatttccctgctatttctcgtatttatctgggcaggctggaaaatcgacaaagccatagccgttgccatgtgttttgcgttatcgtctacagcaattgtgctgcagactttacaggaaaaaaacaatttaaaaacattagccggagaagcttcattttccaccttgctgtttcaggatattgcggtgattcctattttggcgattcttccgctgattgccaattacaaatccagacatcacgataacgaaattcaggtgcttatacagactcttccggaatggatgcagttcgcgaccgttattttgggagtggttattttaattttactggggcggtatgtttttgttccttttttaagatatgtctcgaaatccggaatgtcggaacttttaacggcctcttccctatttttggtcatcggagtttcagaactcatggttgctattggcttatctcccgctttaggagctttccttgcaggagtcatgttagccaacagcgaattccgccacgaactggaagcacagatcgatcccttcaaaggattactgcttgccgtattttttgtaagtgtgggttccacgatgaattttaacgtcattcagaaagatccgacctttattttcaccacggttttcgcagttttagccataaagttcgccgttttatttcttatcggaaaatttttcaaaatagatactccacaaagcctgttttatgcttttgctctttcgcaggtaggagaatttgcttttgtactgattaattatgcttcaagtctgtatcttttaccttctgaactgaatgcgcagatgatggctgtaacggcaattaccatgtgcatcacgccgtttttattaattattaatgataaacttattactccgagattcataaaagaagttcctgatcccgataatgattttaatattttggacggtaatattcagcaaaagaaaattatcattgtaggattcggacattttggaagtacagtcggaagacttttaaaagcgaataaaattccggcaacggttttggatcgagattctgaccgtgtgaaattattgagaagctacggttttaaggtgtattacggagatgccacaaaaattcctaccttacgcgcagcaggaattgaggatgccgaaattcttgttctgtgtcttgatgatcccgaagacaataaatttgttgccgatatcgtaagggaaaattatcctcaggtaaaaatctttgtacgtgccaaaaacagaatagattcttatgaatatttaaacagcggaattcataatatctaccgtgaaactctgggaaccgccgtagatatggcagttgatgttcttcatgcaaccggaatgaggaaatacgcagcgagacgtctcgggcaaagattcatgaccatcgacaaagcttccatccgaaaattagccaaatcggatcatgatgatgagatccatctttttaccacaaaagaaatcctcctgcgagaggaggaattattggcgtatgataatcttaattttgataatcagcaatgggaggattcttctaatgatgaagaggatgaagatgaaaattaataccttactttgatttaaataaactaatcagttatcattttaacgctataccgaaaagatttttatctcaaacatttaattttccgttcgcaatggcatttcattcagcaaagattacactactgaatagttacgcttccgccgctgctttcgtttttggtaatattggtaacgtttcctcttttatacacattcacgcttccgccggatgacgcttctgcattaatggaagaagacgcactgatgtctacgctcgctccgctggatgaatctgttttcagattctgaactataacatctttggcagaaatactgcttcctgatgaagcactgatctccgcatttttagctttaccggaaagatccacacttgcagcggatgaagcatccacatcaagatctaccgcccagatttttccgtcgaaacttccgctgctgtctatggaaatattaaatgtatttgcttcaagatctccggaaaccgctgcagaactcgaaacttcaagttccattttatcctgcacaaatttatccttcactttaacgctggctgcagaattggcatttaattttgaaaaatctttcgtataaattctcgcagaaacattgtgggtattcatcacacggattcccggtttgtaatggatatgaagctctcctccgttgttatccaccaaaacctcgtcgataatatttttgggagcagaaattacgaccttttcaaaatcagcttttataatttcagcttctattgcctgtgaaacttcaatttcatcgaaatcgcccgtcacttctttatggctcatcggtccgttgtctttcgttactactttttccacccagtttttctgttcgttgccgttatgatgtcggtcatttttatcgcaagaagccagaagtgcaacaactgaaaaaagaaaaatagtctgtgatttcatgtgtattattttatgaattaagttttaagtatctttataccttattaacaactaatttatgaaaaatattacatcggtattattaatttctgcattagcattcaaccaatcatgtacaacaatgaaaaacaccgatagccaacaggaagtttcagctccggacgcatcgctttcatcgaatcctttcatgaaaaaaagcaaacttcagtatgaagctcctgaatttgacaaaattaaaaatgaacattttaaacccgcttttgattttggcttgaaacagcacgacgctgaaattttaaaaattgccaacaattctgaagcaccaacgtttgaaaacaccatcgtagctctggaaaaaagcggtgaagttctgaaaagagcaaccattgtattctctaatcttaccagcgccaatacaaacccgactttacaggctcttgatgaagaatatgcccctatctttgcagcccattctgataaaatgtatctgaatgaaaatctctataaaagaataaaagcgatttctgagaatggtttagacgctgaaagcaaaagattattacaatattacaagcagaacttcgaaatcgcaggagcgaatctttcttctgcggataaagagaaactaaagcagatcaatcaggaactggcttcactgtctacgcaatattccaacaaattgcttgaagcgagaaagcagggcggtgttttctttacggatgcaaaagaacttgaaggactttccgccgatgaaattgctgcggcagcttctgatgctaaaaatgcaggaaaaccgggacagtatcttttagcattacaaaatacaacacaacaacctcttttacagaatcttaaaaacagagcaacgagagaaaaactcttcaaagcatcatggacaagagctgaaaaaggggatggaaacgatacaagggaaaccattgaaaaattagcgaaattaagactgaaaaaagctcaggttttaggtaaaaaaagcttcgcagaatggaaattgcaggatcagatggcaaaaacgccggaagccgcaacgaaattaatgaaccagattgcgactcctgcggtagaaacagcaagacgtgaggcaaaagatattcaggatctaatcgatcagcagaaaggaggtttcaaggttgaaccatgggactggaatttttacgctgaacaggtaagaaaggcaaaatttgatcttgatgaaagtgaaattaagccttattttgaaattacaaccgttttggaaaaaggagtgttcttcgctgcggaaaaattctatgggttaactttcaaaaagagaacggatcttccggtttatcatcctgatgtggtaacttatgaggttttcgatcatgacggaaaatccattgccatttattatctggatttctacacgagggattctaaaaacggaggagcgtggatgagcaattttgtagagcagtcttatttattgggaacaaaacctgtaatagtaaactgctacaattatcagaaaccggctccgggaaaaccttctttaataagttatgatgatgtttccactatttttcatgaattcggacattctattcacgggatgtttgccagccagaaatatccttccctttccggaaccaatgtaccgagagatttcgtggaattcccttcacagatcaacgaacactgggcattagatcctgttgttttaaagaactacgctttacattacgaaacaaaacagcccattccgcaaactttggttgataaaattaaaaaagcggcaactttcaatcagggttacatgaccactgaattggtttctgcggctgaattagatatggattggcatacagtaaccaatgaaagtcagttaatccctgttttagattttgaaaaagaatctttaaggaaacacggatttactttggcaacagtaccgccgagatatcacacgccttattttgcacacatttggggcggtggttattctgcaggatattatgcttatttatggtctgaaactctggataacgacgcctgggaatggatttctaaaaatggaggattgacaagagaaaacggagaccgcttcagaaaatatattctgtctgtaggaaattctgtggatctgaatcaggcattcagagattttacaggacacgatccggatattaagcctttattgagaaacaggggttttattaaataaatttttaaaagcattcaatttttggatgcttttttttgatttaaacactaataacacaaatgtttttcacaaatagcacaaatcttttcttagaaaaaatctgtgaaaatccggatgatttgtgggaaatataaatgaatctggctaatgccttgggcagcaatttattttttcaaaagtgctaaagtcagctcctattgatcccaactttgtaaggtgagtgaaaatattcgtatacatttgcttcaataaaagcaaaaataaatatatttgatactattatttaaccaatgaaaactttaatttttctatgaaatttctaactcttttaagcatttcgtggcagcacatattaattattttactaatcatcactcctatttattttatacctacatttattgcttacagtagaaaacattccaacgcaggtgctatatttgcattgaattttttcttaggctgggcattaataggctgggtaggagcattaatatgggctttgtcaaacagatcaaataatcaacaaataattgtcaattccaataatccgcataattacaattctaacattgatcaattggctaagttaaaagaacttcatgacaaaggtgtacttaccgatgaagagttcacagatcaaaaaaataaattgcttagttaaaaaagaatttaagacttttgcaatctaaaatttaaaacaatgaactgtccctgctgttccggaaagagctacgaagaatgctgtaaaccttatcatacaaaagaaaaatttgcacctaccgcagaagcattgatgcgttcaaggttttcggcatttgcaattccgaacggaaaatatttgatggagaccacttcgccgagtaaaaggcagtttcacaatacaaaagatttacaggaatgggaagaaattaatgagtggacaaaacttgaaattgtaaataagccttctattaataaagtggaattcaaagctttttacaccgatgaaaacggcgaaaaccatgttcatcacgaattatccacttttaaaatgatccagaaccgttggttttatgttaatggtgaatttttagaataattttttgttggtaatcgcaaaggtgcaaggttttattataatcattatgctttaaggcgcaaggattttatcttcgataaaattcattgtgtgaaattttctttaaacaaaaaaatgtccagcatttctgccagacattcgtattttattgagaaaactcttagtgagcttcgtttccgtctactccatgagcgtgaccgtgagacaactcttcttctgttgcaggacgtgtatttaagatttcaacctggaaatctaacgttttcccagccattgggtgattaagatctgccacaacagcttccggagttacctcaaccacaattgcctgaaagttatttccttgattgtcggataaaggtaaaattgctcctacaggcggaattccagcttcctggaacatgtcgatcggcaactgagcaattgcatcaggctgtctttcgccatacgcttcttcaggcttaatcgtaaaatcagctttatctccagcttgtaaaccgtggatattctgttcaaattttggaatcatcattcctactccatacaaaaatgtaagtgggttttctgctgttgtttcttctacaagaattttacttccatccggctcaatagtatgtaggatatactttacagctacaacgtgattgttttcgattgtcatattttattcttttttcgtgattgctttcacgattaacggcacaaagatactgtttttgaaatcattgaccgaagaaatatttatctgtctttttttctttcgttacgctttttttctctctgtacaaaaaggtataaactttccactttagctcttgcccagtcggtttttcttaaaaatttcaaagaagagttaatgctcggattgtctgtaaaacatctgatgttgatcttttcaccaagtttttcaaaaccgttataatattctaccagctcttcaagaatggcatctagtctttttccgtgcagaggatctttagattgttgttccatgccgtaaaagtagagaatttgtatttcatgacaaataaattaattttaatgaaaataaaaaaattactgcttttaaataatttttcacaaattataaattcaaattaataatttcgttcaatgaaaaagcttttaccgcatattatccttattccgctgcttcttacaatcccgattgtttcttctccggatttcgacggaacgctttcggttttcagggttcctccatttcaaagagagtttatccgctttgtactggttattattttcttttatttaaaccttaaaatctttcttccaaaatattaccgaagaaaaaaatatttccttttctcactttttgtaattatctgttttggatgtatggcatttctgcctacttatctttctccggaaaatatgtttccggaagtatatccgaaaatacagatgagtcctcctgaaatgcctgatccaaatggaaatttccccaaacctccaatgaatggagagcctccatttcgcaattttgcttctaaaagaaatgacggcacttatcatcagatgatattttcttctcttttgccatttcttttttcgttcttatcctcattctttatttatagaagtaatgaaaaaaaggaattggaaaaattaaaggcaaaagcagagctattaaatttaaagtatcagttgcagcctcattttctgtttaatattttgaattctatctattctctggctttattaaaatctgacgatacgcctgaaggaattttaaagctctccaatgtaatgcgatatgtggtacaggaaagcagcaaagattttgtggaactgaacagggagatagattatataaaagattatatttcgcttcaactgataagaacagacaatagtcttgatttttcttataccgagatcggggaaacgcagggactgagaattgccccgttcattttggttaattttgtagaaaatgcatttaagtatggcttcaatgcggaaaaaaactctaaaatttctgtgaaagtagtcattcaggaaggtactcttagttttaatgtttttaataatattgtgaacgaaaatataacggatgaaagcagcctgaaagtaggactgaaaaatacgactgaacatttgcagcagatttatggagaaaaacagactcttatcataaaagatgacggaaagacctatgatgttgatttaaaaattaatttaatctgatacgtgatgataaaagcaattgcactggatgatgagattctggctcttaaaattattgaaaattatgccggaaaaattgagaatctttccctggaaaagaccttcaatatacaaagcgatgcacagaaacacctcaataaatatcctgttgatctgatttttctggatattgaaatgccttccaaaaacggaatggatttctataaaagtatttctcagaatacaaaagttatttttaccacagcatattctgaatatgccgtagaagctttcagtatcaatgcggtagattatctattaaaacctttttcgtttgaacgatttaaagccgctgtggataaagtaaaagtgagtagtgaatctgctgatgtaaaatatctttccatccgagcagattataaacttcacaaaattaattttgatgatattattttgatcgaaggtttagacgattacattcagattcatcttgcagatcattccaagattaccgcgcgttcctccatgaaaaatattctggaaaaactttcagaaaaagattttgtaagagtacaccgttcttatattgttcccgtaaaccttattaaaacaattgtaaaccgcaatattcacattggggaatttatcattccgattggggaaacattcaaaggtgtggtaatggaaattgtgaataaataattttaattcatctctaaaaccaccgcgtcaaaaattcttcgaatttttgccaccctgaatttctattcggtaattttctgctatttctatcatattattcttaatatttcttaaaaaaaatccatttaccgacacatttttactgtttacctcataaatttcataagctgtttttttcaaaatacatttgttacaggaaattgaaagaatgaaattaaaatcattcaaatagtaaccttaaaaaaacatattatgaaaacaatagacagaaaaggttttttaaaaactcttggtttggcaggtgttactgcggtggcagctcctattttgatacgttgcggaagtgatgacgatatcacagatactacaacaggttcatcttcaggttcaggatcttcttccggatcaacttcatcggcatgttctgttaccaattcagaaaccgaaggaccttttcctacaaaatcaccttctacacttgtacagactaatatcgtaggagacagaacaggtgtcccgttcacaattacaattaccattcagaataccaatgcaagctgtgccaatcttcagggagctattgttgatatctggcattgcgacaaagacggaaactattctgagtacggaggaacgacgatgcagactgccgattatacgtcttaccatttcctgagaggaagacagacaaccgatgccaacggaaaagtttctttcacaagtatatttccgggatggtatcagagcagagccacccacatccatgttcacatttataattctgcagggcagtctcttctggtaacgcagattgcatttcctgaaggcagtgacagcgcagtggttcaggtagcttcaagtacaggatataaaggaatgagcggatatacttataatgcaaatgataatgtattcagcgacggaacatctaatgaaatgtctacgattacaggaagtgtaagtgcaggttacgctcttacccatacaataaaagtttcggcttaaaaataaaacagaggttgtttactattagtttattagttttccactaaagcacagatttacgcgggtgtgaagtgattagatgtgtttatctgtgcggtgtggaattcctcaaaaaaatccaatcaaaatgttagttcaaagtccatccagaatttttaaatctgatctttccgtctggaggaaagaaaactcatgtgttctgaacgagatgattcccgatgaacagtcaggattgcacaaaataacagaagttgttttcgaggaaaacggaacatttgattttaattatcaaaaaagttctatcgttctcatcattgttctcttcggcgaaattttcattaacgattttgagaaacctgtttctccggagcacatctttactttaaagtctgaagaaggcaatacactgaacatcagaaacaatacaccggatgagaaagccgacattctgatttttgaactaaaaagtattaaaaaagacaatttcttcagcattgaaaacctgaatttagaccgtagaaatcatttgatacagatttctgaaaaactggaatatcctaatttcataggtctgtacgaaggaaggaaagaagaggaatattccttacatcagaaaggaaaatcaattttcggaatggtaataaacggcgcttttgaatttcagaacagacttttagaaaccagagatgccattatcatttctgaaattgaaacccttgaatttgaagcgttaagcgaaaacgcccttttaattttccttgaagtttaatttaaaataaaaactaaatacatggacagaaaaaaatttttaaaaaattcattcggattagcaggaatagctgttgctgcgcctgttcttctccgatcggaaatttttcatgaggaaatgctgcccgaaaaatcttctcaaaatgttctaacgtgcagtgtaaccaattcggaaacagcgggtccttttcctacgcatactccttctagccttgtacaaaccaatattgtgggagacagaaccggcgttgcctttacgatgaatatttacatcaagaataccaacggaaactgtgctgcctatcaaggagttctggtagacgtttggcattgtgataaagacggcaactattccgaatacggaggtacggcaatgcaggctgcaaattacaccaacaatcattttcttcgcggaagacagaccacggatgcaaacggacttgtaagtttcacgagcatatttccgggatggtatcagagcagagccacccatattcatgttcatatttacaaagcagacggaacttctcttctggtaacacagattgcttttccggagggaacaagcagtgctgtttataatgtgaatgtaaacggaacttcatacggctatacaaaaggtatgacgggatacacctataatgccagtgacaatgtattttcagacggaaccagcaatgagatgagtaccgtaacgggttctttatctgcgggatatattttaactcataccatttatgtagcaggagccgttttaggaactcaggaagcagcaaacaccaaaaattttaatgtgggacagaattatccaaatcctttcagagaagagactattttcccgattactcttaacgaaagatcaacagtaagtattgaactgtttgatgtgagcggaaaaaaacttttcagtgtgatcgacaaacaaaaacttgcatccggaaatcagcagatcaaaatgacgaaaaaccaattaaaatccggaatgtatgtcgcaaaaattactattgataatacgaaaggaacgtttacagagaatcttaaagttcttgtaaactaagcttcttgagtattagatatttttcatatcaattttgtttaggatcagggcagaaatcataaaagaactgccctgttttattaaaatttaaaatgatgaaggctaaaataaaacttgcattcaggattgtaattgatcagaattctgaaattatctgggataaatatatctttgaagatacttttttcgagtataaaattcagcatcaggttttcgatgataaagagaatccggtaaagaattactgggaattgctgagaaaaaatcctcatgcagaaagaattccgtttttactgagttcagcggtggtaaactatgttgcccagcttaacggtgaagttaaaagccttcctgatgttttgggaaatacttttttcccgattgaaaatttcaaactggatctcatcagttccaatgtggaagattcttcaaagcataaaataggtttaactttttacacgcctgaattgttgctgatcgacattatcgacaataagtatcttttaagcaaaaatacttcgggagactcttttgaaacgtttatgtttgcttttcatccacaggttgcaatagcttcttatacagctttataatttatattgattaatttctaaacaacaggatgttgtttcatttttacagatgatttttattaaagagaaacctccgctgaatttcagcggaggttttgttttaaagatcttggatgagtggttttacttctttgccaaacagctcaatagatttcatcataagatcatgctccggagctcccacatccatgtgtccgataaatcttgtgataccgaaaatttctttcaggtaggcaattttatctgccacttctttcggagtaccgatgaacaacgctccttctttgcttcttccgccgtcatactgcattttggtgtaaggagcccaacctctggaagaaccgattctatccatctgcgatttataattgtggaaatatccttcaatcacttccggatcatcacttacaaaagtatgcgaatgaacggcaatctgcatttttgaaacatcatgacctgcttttttatattcctgtttgtagaattcaattaaatttctgaattgtaccggcattcctccaataattgccaccactaaaggcattcctaattctgcggcacttaaaaccgactgtggagttccgccgacagctctccagatgggcagttttcctttattttttgccctcggataaacggtttgattctgcatcggtgcacgaagttttcctttccaggttacattttcctgagaattgattttaagcaataagtctaatttttcatcaaaaagttcctcataatcgtttaaagaatacccatacaaaggaaacgattcgatgaaacttcctcttccgacgaaaatttcagcacgcccgtctgagattaaatccagagtcgagaaatcttcatatacctttacaggctctgatgaacttaaaaccgtaacaccgcttgccagtttaatatttcttgtaatacttgccgctgcagccagaacaatttccggagaagaaactgcataatcgggacggtggtgttctcccatggcaaaaacatcaattcccacctcatccatgaattttatctgctccagaatttcacgaatctttactcctgcatctttatattttcctgttgtctggtcgaaagcaagatcgccaaacattcctattcctaattccatattgttgattttatagtacaaatttacggcaactgaaaatcagatgcattgatgtttggtaagaaaggaaatggaatattaagtgctgattttgcttttaagtcttaaaaactgtttttcgaaaagatggtaagaaagcacggaacatacaactgaagcaataaatgacagcgcaacgactaacatccagttgagattgaatctatttcctatttttataaaaaacatgattaaaatggtgtgaaaaagatacagtccgtatgtatattttccaagttttgccaaaatacttttatctgaaattttaaaaacattttttgttcctaaagtagataaaattaaccctgaaaagaaaacactcaggagaaatgaaataagtatgagatttgaaattatttttgaattccctataaaaataacaaatgccaatatcaaaaaaacataactgtatttgtaaacagcagaaaccgtttcaagcttttggattagatcttttctaaagacaaaaatatacgcaggaatggctccgaaagcaaaataatgaatattcgtaaagagatctaaagtcggaatttttaattttccatacacgatctgcatgatgaatgaaaaaacaatacttcccagaagaagtttcggaatatttttaagagaaatgaaataaaaagccagtccccagaaaatgtaaaaatgctcctcgatgcacaaagaccagatcacggtaatcggcgatacattgggaagctgattggtatacatcgccatataattttccagaaaagtaagggtaaaccaccaatttggctgatatccttcgttggaataggaaatattaaaaaaatcaagaataaatggcgtgcatatcgcaaaaagtaccatggcataataaagcggccatattcttaaaatccttctcataaagaactttttcagcggaattgttccgttattgtttattttttcgagaataagaatataggtgatgaggaaaccgctcagtacgaagaaaaaagaaacaccaatccccccttgcttggaaaaatagtatagaaaactatcttcgggaacgggggaatggcgtaaaaaaaccaataaaaaagacagaaacctcaacgaatcgaacgtatgaaagtgtactctgccttttttggtgaagttcattatcaatatttcaggattattttttcagattctgatcaaaataatctgttactttctgcataagatgcactctgtcttttccgatcacgttgtgcggatgtcccggatatacaaaatagtccaactgaacaccattatcaaccgcagatttgatgaatttaaccgaatgctgccaaaccacaacatcatcctgtgctccgtgaatcatcagtaattttcctttcagattctgaactttatccagaagattggctgttgcatatccttgcggattttcctgcggtgtatccatgtatctttcgccatacatgatctcgtacatactccagtcgattacaggtcctcctgcaacgcccactttgaaaacatcaggcttacgaagcataaaacttgttgtcataaaccctccgaagctccatccgtggattcccattctttcggaatctacgtaaggaagagattttaaatactctactcctttcatctggtcgttcatttctgtagttcccagatttctgaaaacagcctgctcgaattttaacccacggttagaagaacctcttccgtccatcgtgaaaatgatgtatccgttttgcgccatgtattcgtaccaaagatttccggatgcggggaaagaattggtaataagctgcaaatgcggaccgttgtataaataaacaatcaccggatatttcttgttctgatcaaaattggtcggaagaattatttttccgtacaaaattgttccgtcatcggcttttaagttgatattcttaatttccgggcgctgataatttttcagtgtattttcagcagtcagaagattgtttgtctttaaagtattcgtattaatgatgttggcaactcttggcgtttctgcgttgctgtagacatcatacaggaaattcccgtcgctgcttaacactccggaatgaactccttctgcgctatccattctctgcatcttaaaatttgtccagttgattctgtacaaatgcttttccagcggagtttctttggtggaagtaaaatagatttcttttttcttttcattgaaacctaaaatatccgttaccagccaatctccttttgtaatctgtgcaacgagtcccttttccagattgtagtggaacaaatggttgtatcctgttctctggctctgccagatgaaatctgtattggaatttggaaagaacgttaaaggatgttgaggttccacatatttatcactggtttcttcgaataaagttttcactaaatttcctgtcgaagcatcatattgattcattttcaggtaattctgtcctctgttcagaacgcctacaaaaatatattttgaatccggactccaggtaacagccgttaaatactgatctttttcgccttcgatatttaagaaggttgtgttctgagttttaatattgaaaactcctagagttacctgatgagatgttttccccgccatcggatatttgatattgtgatttacggcaggagttacagaccagtcaataatcggataatcagcaaccatcgtctgatccattctgtaaaaagcaacactttcagaatttggtgccgggaaaattccggtatcaattccgaattcatttcggtgaacgttggaagctccattcaggatattttcatcggtatcattggttactgcaatagtttttccgtttttattaacaaataaattattctttaccgtaaatgcaaaagtctggttatccccaaaaatctttatattttcagcgttattatccaaagcaacggaattttttgttttccagtcgctgccggatttttctagccataccatttttccgccggaattaaaatatccctgagaattgctgatgaatttaatttgtggaactgctttgaatttattgtctgctaaattcttattcagttgagataaagaaaccagcgtatcctgtttgttggttttcagatctgtgattaaatatccgccttttaccgcctgaatataagattttccatctgcagaccatgaaaactgcgagatgtttttaacagctaagttggttctcatcccgtttactgcctccgccattgtaaatttttgggtctgcgccaatgcgctgcttcccaaaaccagcatccataaagataatttatataatttcattgtataaaattgaatccttcaaaaataagaaataaatatcaatggttaagaagtgttaaagtaaaatggagtttggttttttgttggttgctgatggctgtttgcttttgtttattttgaatttatttgaagtaatttcaaatcttattaaatgataaagtgagacttttgctttattaagatttctacgtcacaatgactggattagaattttaacgcaaaatacgcaaagggatttttaaatgattaggcggatttcgttcgcaacgacacttcgacaagctcaacataaactaaacttgtctaaacttttttaccacaaaagatgcaaaagattgtaacactttagcagtttaagtttaatacttaaatagaaaaaagagtacataagttaaaaaaaatcaaagattttttctctttgcagacttttgaaatactttgaataaatccaataaagacttttgtgtacgattttttgagactgcttcgccgcttcagaactacgttcgcagaccttcagtctgttcgtagtgacggttaatgaataaccggcttcaatcctagccgtgattgcagcaattgtctgagctcatttctttagtttcggcgcggcaaagccgcgccgaaactaaagaaatagcgagtgcggaaagcgcgataaagctcctgattaggttggagacttttaaagttgggaagttggagggtttgagcgtgtgagtgtttaagtgtttgagtgtatgagcgtactagaatttaaagttgttttgtttttccttaaaaatattttggggatttctctttcgttgaaatgacaggattgtgaaaaatacagcgaaaagcatttcttatcctacgtcaatgatttgtacctctcttctgatatacatttgcagtataattaacaacaaaaaatattaatacaatggcaacaaaatggaacctagaccctgctcacagtgaaattacttttaaagtaaaacacatgatgatctctaatatcaaaggaaactttacagattttacggctgaaattgatgcggaagacgatacttttgcaaatgctaaaacaacagcaacagttcagacagcttctatctctacgcacaattcagacagagataaccatttaagatctgctgaattctttaacgctgaagctaatccaacaattacttttgaatcttctgctttgaacaatgaagtaacaggaaatttaacgattaacggaattacgaagcctgtaacacttgatgtggatttcaatggaatcaacgtagatccgtggggaaatacaaaggctggtttctctttcgaagggaaaatcaacagaaaagatttcggactgaactggaatgctgctcttgaagcgggaggtgtaatggtaagcgaggaagtgaaaatcgccggagaattacagtttgtaaaacaagcataaaacataaaaaatcaaggtaaaagagcaaaggaaagttacattacctttgctcttttctgtttttgagaataaaaaaatgaacctcaacgatttacaaaacatcagcgaaaattttaataataccgagaaaatgcctgttctttttctgggacacggttcgccgatgaatgctattgaagaaaaccagtttgtacagggtttccgaaaagctgcggctgaaattccgaaaccgaatgccattctctgtatttcggcacactggtttacgcagggaacgaaagtgacggcaatggatatgccgagaaccattcatgattttggaggttttccgcaagccttgtttgatgtacagtatccggctcctggaaatcctgagttggcaaaagagacggcagaattcctggctccggttgtcgtggaggaagattacaactggggactggatcacggagcatggtctgtgattaaacatatgtatccgaatgcagatattcctgttattcaaatgagtattgattatacaaaacctccgcagtatcattttgatttagctaagaaactcaataagctccgcgaaaaaggaattttaattatcggaagcggaaacattgttcataatttgagactgatcgactggagaaatatcaatactgtcggagccggatgggactgggcgattgaagccagagagaaaaccaacaactggcttttggacggaaatttccggaatataattgagtaccagaaacagggaacttcgctgcaatatgcggttcccactcccgatcattatctccctttactctatactttaggactaaaagagaaatctgaaaacctgagtttatttaatgatgaattaattgcaggatctctgagtatgacgagcgtgagaataggataaaaaaaacggaagaaattttcttccgtttcttttttattaagggcaatgctatcattagattctttggataccaacaacatgaggttgtccgtcaatcggagcatagatttctacaacggcattccaaactacctcagaaggcggcatggaagcaaggcactggtaacggtagtttgttccgtttacgacttgtgtagatacagattgcggttgatattttactccaacaaatccattcattgcttcgtcgaatactttttgatcttccggtgttaaaggatgatacgctgtccagcctcctactaattcttttgtttccatgttttaattttattttgtgttcctactcttctggcttttcggatttcgccccgtttgaatggtttctggtctccatgattattaagttttgtttgtgatcacctttcaaagataccacacttcctctagagcggttagcgtagatttactaatttttcactttaagtagaaatacttaatatgatgattcaggagaaataaaaagggaatatcgttaattaacaatattccctttcctctatttttaatttaattctttactgtactgcctgtaaaacattaatatttccatatccgtaatctgagttcggagtcggataataggttgcagactgtctcattttattaataacctgatctctcgtccatgaaggatttttagcccagaccaacgccgcaattcctgcggtggaagctgttgctacagaagaaccacctacataatccgtttgtccgttatagtaacttaagaccggaatgttgcttcctgaacctctttccatctgataagtaaaatcgatttcgcttcctgagtggcaaacgtcgcatttctgattggacgtattttcttttactccggttatcgcttgtgtttcaggcatccaagccggaaaaataacgcctacgaaattggtgaagctagtggaagttccgcctgcgcagaaaattaattttccttttgaatacgcatattttacgccatcttcaatttttccgacagagaaaatatgtcccatcgacattgaaataatttttacactgttattattcccaagttctgtaaaggcaattttaactccgttttgctcatgatatccgtccagaactacattagaagctgctctgtacgttaccagattggcattgtaagccacaccaaccggctgtccctgattatttctcggagcggcggcggcagaagccatgcttgttccgtgaccgcatttgtcggcagaaccgtcgtatcctgtactccacggccagactgaatctacatacactccatttttgctgatggttcttcctgtagaaagtccgttattaaagctgcttcctaataaagactgctccggagaaacaccgctgtctataactcctatagtcactccagctcctgtgctgtagctccatgcattaatgatattgtgtttcgtaaatgaccacggtgcttttgcgttaggagaaacggttgtataatccgcagcattcaaagcggtagattcaaatccgcatcctgaagaactgctgctggattttgcagttgccccgaattgtttttcgttttcaaaataacggtaatctgcaggttcaaaataacggatgtttttcatttttctaagggcaatcaccgtttcctgcttttcgatggcaacgtcgatctgattcagatgttggtctgaagacagtaaaattctgtcggtctttccttcatattttttaatcaggtctaaaatttcgttttcaatggctttgttgtctgcatccagacttctgtcgaaagaagagccaaatccgatggaagcaattttatttccctgaaaaatcccgctccacagaaaatgatcggaagattcattccatgaaaatctgcctttcgttttgatggtttcgttgattttttcattgatctgttttgccgttaaaggatctttctgggtaatttccgtactggcaacattgttctgaagatcgtctctgttacatgccgtgaaaacaaagaataacaataaaaggtaaaaaacattttttctcatataaatactatttgattggtaaaaccaagatattaatttacaatgaattaccgaacaacagaatttaaaaatttattatgcttaaaataatactataaaattaagctataaaactttttcataacagacacttttatccattccgatgtactgtccgtaatttggaattcttgtgtaaccgcttttttcataaacagaaagggcttcattctgctccaatgagctttctaataacgcttttgtataattcaattcctttgcccagatttccagttctttaacgatcgttgttgctaaacccttctttctgaaatcaggattggtgtacattcttttaatttcaactgtttcttcatcaaattttttaaatgccccacaagccgcaggaatttcatccacataaataacaatacagtttttgatcgcatcagttttgttaaactgatcgtaaaaagcatgatcttccccattgcgaatggctaaatctgcatctaaaagctgtactaaattttgaaaatctttattggaagaatctgttcttttaattgtcatggcaatggttttaggctaaattaaagattttgtttttatcttttaatactttttcaaaggttatattttttaacacaaataacactcatattttcacaattcaatacaaatattttttttaaatcttaaaaaataaaaaagacttccatttgcggaagcctttgtgttatttactttttggtggtggtggagattgataccctttttgttcgttaattttatcaatcagctttttagctaaattctgtccccactctctgccgacttccatactttcattcatgattaaaggcatgttagaaattgtcttttgcccgataggagttttataaaattttatcagctcatcaagatccgattctgtataatattttgaataaataggaatgtagagtttagaaaattcgtctgaagaaacttcctttaaaaatccattccaaaattcatcaggaatatctttgtaattttctttgtaagcatttacaaattgctgagctccctgtaccgccattttactgactccggtaacttcaattaattccttaatttttgcttcttttgaagtttgggcaaaacctgtaactcctataaaaagagcaaacgctactataatttttttcatcttgttttaattaactataaatttcctttcatttatcaattctgctattgcaagcatatcctgaccaatcagtcggtcatcttcaagcttggcaacttttgaacggagaactgcatagttttcttcaataatttttgaacattttgccggtcttcggaattctaaaccttgtgctgcaaacataagttcaaccgctaaaatattgactaaatttccaagaacctgattgaattttctgccggaaatgcttcccatcgaaacatgatcttcctgtccaagactcgttggaatagaatccgcagaagccggaaaacacaatgttttattttccgtaaccaatgctgcagaagtatactgaggaatcataaatcctgaatttaaacccgaactttccgtcagtaatcttggtaagccatattttccttccagtaacaagtaacttcttcggtctgaaatatttcccagttcagcagcagccaaagttgcataatccaaaggtaaagccatcaattgtccgtggaaatttcctccggaaatagattcttccgcgcttaaaacaattggattatctgttaccgaattcagttccgtttctgccatcattttcagatgttcgaaggcatttctgcttgcaccgtgaacctgcggaacacatctcatggaatacggatcctgaactctgtcgcaatattcgtgtgctttaaggttttcggaactctttaaaaatttaagcattcttgccgcaacttttttacttccctcaaaaggacggatctcatgcagttcttttttaaacggacttgcagaacctctgtaagcttcaatactcattgcagccgtcatatccgcaagatcaagcaaatattcaaatttttctaatcctttaatcgcatgcgcaagaataaactgcgttccgttgattaatcccaatccttctttcggtcctaaaaccaaaggttcgagattgtttttttctaaaatttcggctgtttcaaaaatttcattttctacccaaacttttccaagccccaaaagcggcaaaacgagatgtgccaaaggagccaaatctccggaagcccctacagaaccctgctccggaactaccggaataatgtctttttccagcatcaggatcaatctttcgatcacttccagagagactccggaaaaaccttttgacagtgcatgaacttttgcaatcatcatgatttttgaaagttctttatcaatcggctttcctacacctactgcgtgagaaataatcagattatattgtaactgtgcggtttcttcttcagatatttttacgtcgcacaaaggaccgaaccctgtattgattccgtaaaccgttctgtctgattctacaatttcacgtacatttttttgtgattttaaaatctgttctttggcagccttgtttagtttagctttatcaggagttttacagatctccagaacatcatggaaactgaaaacatctacaccgtatatcattctctaaattttgtcttaaaattacacatttggcaacgattggaaaaactaaatttcaacaacatatatttttctgaaaataagtgaattaatttactatttttaccgccgaaatataaaaattaatatcctatgaaacttaaaactttagtgtttacgctgtttcttgtaagcatggcttctttcggacagaaagtaaaatactccaaggaagaaattaaaaaaatggaacagtacctttttaatgaaggttttaatgctccctctgtaaaaaagacatctaccgtaatattaaaggacggaacgactcataaaggtttctgcagcaaaacagatacgaaaaaaggtcagatttttgaggttacactgaaagatagtatttctaaaaagccatcggtatttgttgccgataacatcagcgaaatgtatctgtatccgaatgaggctgaaaaagtcgggaaagtttttaagtacatgggcaacatcagaaactatcagaccaagaaattaaaaaactctacgaccaaagaccgtattcactttgtaaaccagaccgtttccctgaaaaataagaaggacgacaaagaattcttaatgcaggtcatcaatccggaatttgatgatattatttccgtatatcatgatcccagagcaaaagaaacgggcggattttcggtgatgggttctccacaattgggtggcggtgttacaaaatcctactatgtaaaaaaaggagataaagtaatgtggcttcataaagatgatttcgaagacaattatgattttcttttcggagacaatgctgagtttatgaaaaaatatcctaagaattccgtggaatgggattatttcagctttttagtgtatcagtacacagaaatgagccaaagctaaatttcttaagcacaaaagagtaagccgtttataaagttaaccagcgtataaattattttgctcctttttgcggttaattaaaatcaattttaacaaacattataaagctgtagtatttctgcggctttttttgtgcatgtaaattccgtagttttgttatatgaatccttctttagaattacaactcaaaactttaccttccgagccgggtgtttatcgttattatgacaaaaatgatcagcttttgtatgtaggaaaggctaaaaatctgaaaaaaagggttctctcctatttcaacaaaaatctttcagggtaccgcatcaaaatcatggtgggaaaaatccagcggctggaaacaacgatcgttaacagtgaatatgatgcccttttactggaaaataatttaattaaggaacatcagccgttttataatgtcatgctgaaggatgacaaaacgtatccgtggatctgtattaaaaatgaagattttccgagaatttttcttacccgaaccaaaattaaagacggttccgaatattacggaccttacgcaaaagtgcgtcctgcaaagattcttcttgatacgataaagcatatttacaaattaagaacctgcaatctcaatttagctccgagtaaaattgatgaaggaaaatacaaagtatgtctggaatatcacatcaaaaactgtgaaggaccctgcgaaggactggaaagcaaggaagattatgatgaaaaaatagatgccattcgcggaattattaaaggagatttccgtaaagcgaaagaatatctggtgaaccagatgatgaaatatgcaaccaaccttcagtttgaaaatgctcagatcatcaaagaaagaattgatgcgcttgaagattatcagactaaaaatacggtggtgaatccgagtattgatgatgtggatgtttttggaatgacaagtgacgaaacggctgcttacgttaatttctttaaaataaggaacggaaatattatccagagttataccaccgagattaaaaaaatccttgaggaaagcgacgaagatattatggagcaggctttggtggaaatccgtcagaaattcgattctcattcaaaagaagtactcctgccttttcacctgtctattgaaattccgaatgtaaaactgatcgttccgaaagtaggtgataaaaagcgaattgttgagctttctgaaaagaatgcgaaagaataccgtttggaaaaattaaaacaggttcagatcgttgatccggaaagacatacgaacagaattatgtctgaaatgcagaaattgctgagaatgccggttgaaccacgacacattgaaggttttgacaattccaatattcagggaacgaatcctgtttctgcgtgtgttgttttcagagacggaaaaccaagcaaagccgattacagaatttttcatccgaaaactgtggaaggccccaatgatttcgctacaatggaggaagtgatctaccgccgttacaaaagaatgctggatgaaggcgaagatctgcctcagttgattttgatcgacggtggaaaaggtcagttatcttctgcggtaaaaagtctgagactgttaggattatacggaaaaattaccattgtaggcattgcgaaacgtctggaagagattttctttccggaagatcctattcctttatatttggataaaaagtctgaaacactgaaaattttgcagcgtgtaagagacgaagcgcaccgtttcggggtgaaacatcacagaacccgaagaaaaaattctacgataaaatctgaactggaagaaattccgggagttggagaaaaaaccatagaattacttctttctaaactaaagtctgtaaaacgaattaaggaatcgaatttagagacactggaagaaattctgggcaaaagcaaagctaaaatcatttatgattttttcaacgaatagagacaaacataaaataaattataattaataaataattttatgaaaataatttttataatatttgttaatttaaatattttttataaattagatgaagttaaagacttcttaactcaaaaacttcttcatatttaaatttacaaaaaaagtcctcgtaacgaggactttttgatttatgctgtaatgctgctactttttataaaatatttctttgccgtactcacctccggaaacaggcatttcaatcactatatttccattttcgtagtaacctaaagtagattctccgttttgaagttttactctgaaaacatcattttttgtcgttgctttgaaagttgcaaacggtgaagaactgttagaatttaccagaataaactgagaattgtcgatctgaattttttgaaggtccatctttccgttgctgaatttcaacgccgtattgtctacagatgaagaggaactgttggtaacaacttgcgtagagtttgttgttatagtttcctgaacttttaccggagaagcaggctgtgctgtaggattagccggagaaatggaaacaaaagtctgcttcagggcatcctgataaccttctttgtattccttgatgttagaagcgcctttaatggatgaaactactttatcattacagtctttaaactgaaccagtaccttgtttcgtaaaaaaccactgtcgttgatgatatctgccatcaaaacattgcagggattactttgtgcttcagccggccattgtaacttatccgaaggaattactgtataatttttacttcttaaagttttggttaatagattattcaacccgaaatcttctttaaaagtttccagtttcgaaggaagagaaatatatttataatccgaaaccttctgtccgaaagcaaacatcgaactgactgttaatatgataagcgatatttttttcatttaatttaaattttaatcgtttctgaattgcccgatatccagtttcagagaaaagaaattggaatagaaattagatcctccgattccggaattggtaattgcataatccagcgtaagacctctgtatctgatcccgattcccgcacttggctggaaagaaacttttcttctgagatcttcaatatcggtaatcgactggaatctgttcacccccaatctcacgaaaatcatcttctgatagcctaattctgctccggcatacggtgttaaactcgcaaaatcggtagaaaccaatgcggcagtttttgcaaaatctacgttaattcccgcttccggcaatacatatacactgctgttgatttcaaacattttacttacacctgcatttaatttcggcatcgtaagctccattttatcttttggcgcagggttgaattcttctccgttaaccactgttgaaagttctttctgattgacgctccagaagttcaccgttgtagtcgcatctctcagcatccctcccagtttccagccgttgtccattttataaatagcccccacatcgaaaccgaaaccatatccgttggcgaatttccctacatttctgtacacaattttagcgttaatccccacatcaagcttctgatttcctcccggattgaatgcataagaaagaattgctgcgtaatcggactgggagaatttggtaattttgtcataatcaatatttccttcagtatcgattaactgtgtggtatttaagatattatctactcctaatcttacaacagaaactccgaaaactccggtttccagcacttttgcataggctagataatcgtattttgcgatagattcgaaatattcggcgtgcattgccgctccctgccagtctttttccacgcccattaatccagcggggttccacatcggtgaatagacatcatcctgattggagatcaccgcacctcccatggcaagacctcttgctccggctccgatgttcagaaattcgttggaatattttctgatgatctgggattgcgatatcccgaaaaccagagagaatgcaagtaaaaaatattttttcatcatatcaattgatgcttaatttaaagttttttgttttttagcttttatcaatccgttagcaatgattgccagtatcataactcctgaagcgatataaaaaatcgggctcatgtgttctgattccccaaagataaaaaaagctagtataattccgtaaaccggttctaaattaactgttaaaattaatgtaaaaggcgaaatatatttcatgagattcaccgattccagcatcgggaaagctgtgaaaacacttgccagtaaacctattaacgcgatatcgcggtaacttatttcatttatcgaaaaaatttgtcctgagaagagataaaatatcaataaaataaaccatcctgagaatatttcataaaaaatgatatttcctgagcttgtttttccaaacatctttccgttaaaaaccgaaaaaatggttccgaaaatggcacacagcactccgtaaaatattccttctttgtactgaaattctgttttgaagatcaacaaaatacaggcgacaatcaccactcccatgacgacttccgaaacatcaatctttcttttaaaaatcaaaggttccagaatggatgcaaataaggtggataaagacagacagcttaaggcgatggaaacattcgatattttaatggagtaaaaaaagcagtaccagtgaagcgccatcgaaaagccgattgcagccagctggaaaaatactttcttcgaaaccttaatgctgtcttttttgaaaacacggatgtacacaaaaagacagatcgccgcaaacagcattctgtaaaaaaccagaatttctgcattcgcatgaatcagttttcccaaaattgctgtaaatccccacaaaaacactatcaaatgcaatctgaaaagagccaatttatgcatatcctaccttcttttactatttctgcaaaaatacaaataggttttacatttcgtgtaataatttttcagtaaagcttctgattttctgataaaatttaaaatatggttgattgccggaaaacaggatttaagattcctatttaacataaaataaaaaaaccctgaaaatttattcaactttcagggccttcaaataataaactattaaaaaaataaactaggaacttagaggaagtaaagatttcactctcactttctctattgtaaagttagcaaattacgaaccataaaaaatatattttttgttaaatatttcataaaattctgaaaaccaatttattaaacatttgtttatatccattttcattccatgtaaaaaatagtatctttaaacggaaaaaattgaaatttttatggacattgaattcaacaaaagagaagatcagaacagattaaaattatcagaaatcaatcgcttattgacagaaattaaaaaggggggtggtgaaaagaggcttcagaagcttcgtgatgagggaaaaatgacggcaagagaaagaattgactatcttcttgataaggattctgattccatagaaattggtgcttttgcaggacatgagatgtatgaggaacacggaggctgtccaagcggaggggttgttgtggtaatggggtatgtctctaaaagacaatgcatcattgtggcaaatgatgcttctgtaaaggcgggagcatggtttccgatcacgggtaagaaaaatctgagagctcaggaaattgccatggaaaacagacttccgattatttatctggtagattccgcaggtgtttatttgccgatgcaggacgagattttccctgataaggagatgttcggaagaattttcagaaataatgctaaaatgagtgctgcaggaattattcagatttctgctgtgatgggaagctgtgttgcgggtggcgcttatcttccgattatgagtgatgaagcgatgattgtggagggaacgggttctattttccttgcaggaagttatctggtaaaagcggcaatcggggaaagtattgataatgaaactctgggaggagcaactacacattgttcgatttcgggagttacggattataaggctaaagatgataaggatgcgctaaacagaattaagaatatcatgaagtctttgggaagtacggaaaaggcaggttttgacagaattgaaagcgcacagccgaaagaaaagcctgaaaatatttttgggatcatgcctgtttcaagagcggatcagtatgatacctacgatattataaaatgtcttgtagacaattctgagtacgaagaatataagcctgattacgggaaaagtattatctgtgcgactgccagaatcgacggctggtctgtaggaattgtagcgaaccagagaaagcttgtaaaaagcggaaaaggggaaatgcagttcggaggggtaatttattctgattctgcggataaagcaacccgatttattgcgaactgtaaccagagaaaaattcctttggtgtttttacaggatgtcaccggttttatggtgggttctaaatctgagcatggaggaattattaaggatggtgcaaaaatggtgaatgctgtttctaattccgtggttccgaaattcacgattattaccggaaattcttacggagcaggaaattacgcgatgtgcggaaaggcttatgatccaaggttaattgttgcgtggccatgggcagatcttgcggtaatgggtggtgcacaggcagcaaaagttttggcacagatccaggaatctacattgaaaaagcaaggaaaagaaatttctgaggaagaacataaagaaattctggattctatttcagcaaaatataagaaacagacggaagcaacttatgcagcagcaaggttgtggaccgatgcaattattaatcctgtagataccagaaaatggatttctatgggaattgaagcggcaaaccattctccgatcactgagaagtttaatcttggagttatacaggtttgataattgatgattgatgattgatgattgatgataaataaaaaagatgtggaaattaattctacatctttttttgttttgaatgggtaagttagtccaatattttaaattctgactttcatcttagccccgattgcagcatttgtttgagctcattttatagatttggcggcagctttgccgccgccgaatctataaaatagcgagtgcggaaagcgggaaacagctcctcataaaacagattctatgaaaagaaaactcccgttctgaatctttctttattcagttttttattcacagccaatccccaaagaataaattcttttaaaaatagaagatcttcgggttgggtatcgggttggtatttttcaatgatttcatcaagcggagtaattcgatttaggtttttcgcgtagacttcatccggagattcgtcggtaatttctaaaaacccgtcatcctgtaaaaaccagtcggtgatctggctgaatggtccgtctacattctttttctccagtttttctattttggggaaatacgtggtaaacagagtttttaccgcattatctattaaaagttgtgccacagattctgctccttcctgctctccttcataaaccagttctacctttccagtaatcgcaggaataacgccaacgaaatcgcttaatctcaccgaagttttttcttcgccagccaacaaagctctacgttctgccgtactcaacaaattttcgaaagcggtgatgctcatacgtgcactgacaccactttttgcatctacatattcgctctcgcgggcttcaaaaccaatctgttccagaagatcatgggctaaagccgggacatacactccgctattctggcggctgtccagactagattcatattttgtaatttctttcgcaatttggatattttcaggatagtgcgttaaaatctgcgatccgatacggtctttcagaggagtaacgatgcttcctctgttggtataatcttccggattggcggtaaaaacaaactgaatatccaaaggcattctcactttaaatccacgaatctgaacatcgccttcctgtaaaatattaaacagggaaacctgaattcttgcctgtagatccggcaattcattaattacaaaaatacagcggttggctctcggaatcattccaaaatggatcacacgatcgtctgcataagataatttaagattggcagcttttatcggatctacatcaccaataagatcggcaacagtaacatccggagtggcaagtttttcaaaaaatctttcatcgcggtgaagccattcaataggcgtgctatcgccttctttttcaattaattcttttgcaaatcgggaaatcgggttaaaaggatcatcattaatctcgcttccgtcaacataaggaatccattcatccaacaagcttgtcatcattcttgccagtcttgttttagcctgacctcgcaatcctaataaattgatgttatgcttactgagaatggcatgctccaattgaggaattaccgtgttttcgtatccgaagattccctcaaatacagattctttatttcggattttagtttttaaattatcccgtaattcatctttaatatgttttgatgtataacctgatgcttttaacgcacccaacgtttttatttctggctttgcagtcattgtatttaaatctaattgataatttttattgagtaataatcttaacggattcttcttttacgattggattcataatcttcaaaaatcatgtttcctaaaccattaagacctgtataaaatgcttttccctgattggcttctgtaaattcgctcacgaaatgctgcaaataagaatcctgcgcaatcataaaagtagtaattgggatatggagccttcttgcctgagctgccatattgtaacatttctgaactacatattcatccagtccgtaagaattcatataataagtaccatccggttcacgcacacagcttggctttccgtcggtaatcataaaaatttgtttgttggtatttctttttctgcgcaaaatatccattgctaactgtagtcctgcaacagtattggtatgataaggcccaacctgcaggtaaggaagttcctgaatctttacaggccacgcatcatccccaaaaacaataatatctaaagtatcttttgggtaacgcgttgtaattaattcggcaagcgccatcgctacttttttagcaggagtaatacggtcttctccgtaaagaatcatactgtggctgatgtcgatcattaaaacagtgctcatttgagactggtgtatgctgtcttcaacaataagatcattttccgtaagatgaaaatctccgatcccgttattgatttgtgcattctttagactctccgtcattgaaattttttccacagcatctccgaaattataatttctgaactctccggttaagtcttcacctgctccgcttttattcgttttatgatttccgtttccactcttttcaagatttccaaatatatgtttaagtgcctgcttacggatattctgttccattttcgcacttaacgtaactccattgccatttccatctggattaatctcttcccgaatatatcctttcttcttaagatcttcaataaagtcatctattgtatattcaggagtggttaattggtattcttcatccagcatccgaagccagtcaattgcttcatcaaaatcacctgaagtatgagtcagtaaatcagtaaaaatttccagcaatcggtcaaatacagacagttcaggttcctgatatgtattaaacctaaaacctcttacaatatgctctttcatatcataaatttacgatataaattaagagggcttaagagatttagtctattttactttttaagaataaaaataattgaatcaaagaaaagttatccactactttaagtaaaacgtttttggtatgcaaaatatttattcaggagcttattcccgctatccactgtatcttttgggttgcgggcggagcgaagcggagcccgtaacccaaaagaatgccgtttctatcgcggctaagagacaccgtaaatagtaatgagtaatgaataatgaagataattgataaatgattatatcctccggcttctttacttgttacttttctcctggttctttttactttttacttttcccttgtttctttcctttgataagggatagattaagaggagagaggagagttgtgcgaaaaaaaaagtctcatagaattnnnnnnnnnnnnnnnnnnnnnnnnnnnnnnnnnnnnnnnnnnnnnnnnnnnnnnnnnnnnnnnnnnnnnnnnnnnnnnnnnnnnnnnnnnnnnnnnnnnnagacgaattgctatggagctaagggatatggttacagctgtattaatcatttttgcaggaggaaatccagacaaagtttttaaaacttaaaagaggtcggaatttcttccgaccatgactagcggcgaagccgccgccggaaagaccaaaaaaaactctcccaaaaaggagagtttcaatatataaaagcaaatatgcttattagtatctgtaatattcaggtttgaatggtcctttcacatccaccccgatatattctgcctgctcaggagaaagagtttccagttcaacgcttaatttcttaaggtgaagagccgctactttttcatccagatgtttaggcaacatatatacttcgtttccataagcttcagaattgttccaaagttcgatctgagccaaagtctggttagagaaagagttagacattacaaaacttgggtgtcctgtagcacatcctaagtttactaatctaccttccgcaagaataattacttctttaccttctaccgtgtagatatcaacctgaggttttacttcagattttgtgtgaccgtagttgtcgtttaaccaagccatatcgatttcgttatcgaaatgtccgatgttacaaacgatcgctttatctttcattttaaggaaatgttcacctcttacgatgttgaagttacctgttgttgtaatgatgatatctgcgttatccactacagtatctaatctttttacttcgtaaccgtccattgcagcctgaagcgcacaaattggatcaatttcagtaactgtaacaatagaacccgctcctctgaaagaagcagcagtacctttacctacatctccgtatccgcaaactaccactctttttccggctaacataacgtctgtagctcttcttacagcgtctactgcagattctttacatccgtacttgttgtcgaatttagatttcgttacagaatcgtttacgttgatggcaggcattaccaaagttccgttcttcattctttcgtacaatctgtgaacacctgttgttgtttcttcagaaagacctttaattcccgcggtaagttcagggaacttatcaaaaaccatgttggttaaatcacccccatcatcaagaatcatgttcaacggttttctgtcttcaccaaagaaaatagtctgctcaatacaccagtcgaattcctcagcgttcatacctttccaagcgtaaaccggaattcctgcagcagcaatagcagcagcagcgtgatcctgtgtagagaaaatattacaagaagaccatgtaacttcagcacctaaagctaccaatgtctcgataagtacagcagtctggatcgtcatgtgaagacatcctgcgattcttgcaccttttaacggttgagacggtccgtattcttcacgaatcgccatcaaaccaggcatttccgcttcagcaagggtaatttcttttcttccccattctgcaagggagatgtccttaactttataaggcatgtattgtattgtagtactcatatgaatgaataagttttaattcaattgataatgtgcaaaattacaattaataatttagataaaaaaacgctgttccctcaagaattatatgatattaagcatattataacgatttttattgcattttagataacaacatttaagataatagataatataaatctgaatttaataattttgaatacttctgaattcaaaatacgattcataagaaattgttattttagcaaaataattcaatacatgccactttaccgcgatttttctgatgataatgctacaattctcgtatggaaatatgatgaagatgaaacactggatattcatgaacttctggaacccgaaaatgccgataaagtaaaagattatcatcccaaaaaattactggaagttttaatggtgcgaaaattattaaaaagcctaaaacctgattccaagattttatataaagaaagagaaccatttttatctccaaaagatgcggaaatatccattacacattcatttcctttcgcagccatcgctatttcaaaaaataagataggaatagatattgagaaatttaatcccaaaattttaagggtaatcgataaatttacctacgaaaatgaacgcgggtttattccatcagacaatgaggttactttttacacgattatctggagtgttaaagaaagtatgtataaaattcatcattccaaacactggtcgctgaaaaaacattatgaagtgaagccttttgaactgaaataccttcaccatatcaaatgcagggttcatgatgataaaatctcagatgaatttaaagcaagggtagaattttttgatgattactgctttacgattgttgaagaatagaattgttcttttcaacagaatccgtttcattccggtatttttcaatgacttttcgctgttctttggcaacgtcaaaaatcagttccagaacatcgtgaatattttttagctccgttaaatgcgaaattttgttcggatctctcaaatcataggcttcattttctgtaagctcggtttttcgctttaaaattagatcttccaaagaggaatcttcaggttctatgcggctttccttttttaattcttcggttatagtatctccatgtaaaagaatggaaactttctgcatttcggcttctatttttcggctccagctttcggcgtcaatttcaggatacttttcgtcatcctttacatattgggaaagggaagcggtataggcggtgataaggtgtgaagtcgctacaaactgatgcactacttccagttttttctgctgatttttaggatcggaaatcattctctgaaaattgtcagaaagatttgccaacgaaataatagcgtttttacgctttactttataatcttcaagatcatatttttcttccagaaacttggaaattacactttggaaataactgagattggcttcggcagatttcttcatcagatccagattttgggtatgctcccaaaccggaagaacgatgtaggcaaccagagaagttattatggctgcaataatggtatctacaattctgtctttaaaaatgatgttgacttttccgggacttaaaaaattaaagctcagaaagatgtaaatcgtcataaacagaactgcccagaaatattttcccttcagaaagctgaaacacataatcatgcttaataaaagaatggtaaataaaacttcgttaatgtggatgaaatgcagaattccataggcaattacagctccggcaacagttccgtacaaacggagcagatttctctgtttggtaatggagtaggcgggttttaagatcgcaacaatggtaattaaaatccaataggtgtgtccgattcctaaaaactggaataatgaaaataggtatcccaataataacgcaatcgtaattctcaaagcatgtctgaaatgagatgacgaaagtgaaatattgtttcttaaaactctgaaattcagtttttcctcattgggcatgaattttttaagatcaagacctgttgacagactttttgcaagctttacattctgggagaaaactttataaatctcatcaatttctttggtgatttcgttaatgcgcatcagaatctggcgcagcaccatgaagttttcgaaattttcgggagatatttttttgtttctgaggtcgaaataattatgatttaaattactcagctccgtgtcgagatcgaacattggttttgctcttgtcccgatttgcagggcgattccgatgttggtaatttcttcggcaagcagattaagataatcatgaatatccacaagaatagtggtgtcatcaaaaatctgctgcaatttctgataatcactttctgaagtcatcagtttttcatgaagatccatagaattcagaaacatcagcatcagtaaacggcttgttgtagtagattcgtttacgatggttctcgtcttgaaaaccgtttctctggtttcttcctgcaggttttttattccgatctgtttggcaataacctgtgtggtcagtttatcaaaatccggatttttctgataataattggctttgatttttaaaaattcggctagctgaaggtagttttctccaatcatctgacttgccagtttgtaaggctgaattgtggttaccactagaaatatcagcagaaaccacgtacatcctgaagcaaaaatcagtaaacttttgaaaatattggttccggttaaatgtccgtcgataaaaatggcaagaacaaccaatgataaagaaccaacggcagccaatctctgtccgtaaactccgatcagggaaaagaacattccaaaaactataatttctgcgaaaaccagaattttaaagttcatcacaaggcttgcaaccgttgcaacgaatacgaagcagaatatggcaaaagttaatgcatttcttcttctaatgaaaggtcccggctgatctgttaaggcaacaaagctggttccgagcggaaataggaaatattctttcagaatcccgaagtgggcgagaacgagacagggcagaacggtagccagtgtaatcctgattgcagaatatacatattgactggttacgaattttttgagttctgcagagtagttcatgctacaaaaataagagttaaatgtgaattgtgcgttttactttatgcggtaattattaaatttttgaaaaatctcaagatgtgaattgtcaattttacttcgccagttaaatgtgaatttttcatagataggagctttgtgattcccctcctttggaggggtggcaaaaattcgtaagaatttttgacggggtggtctttatatatccaatatgtattatagtatgggcttgtcattattccgaaatattgaaatcacatacaaaaacctagccgtgatagcagcggttaccccacagcagaaatgggaaaggtgagggattgagattggcgggcgcaggagcgaggagtatgagcggatagcacgaaaaagctcctgaaaaagaagtagagttctaaaaacaaaaaagtcccataaattatgagacttttgtatggtatgtttcagattttaattgtctacgtttgaggtttcatcaccgatgttccatgtaagtccaaaacgaagggtgttatccaaagccgtattaattttagacatattgatcaggtaagaaacgtccagaccgaaagaacggtattttaatccgatacccgcagttgcaaactgtcttgctccctgttcttcactttcgtggaaataccctgttcttacagagaatgcattgtcataagaatattctaatgcaccactatacatgatggaatttttgtttttgaaggattttccgatgcctgccattactcctacgttcggaacaccataaactgggcgttgttctcttgtgatagggtcagtctcgtatctcaataattctgaacccggaactaagatttttgatccttccacgctgattcccactctgttcatatcatcaagatacatatcgtaaccaagtcccagtcttgccatagtaggaagataagatcttgaatcttcgtttcctgtataatccagcttcggacctaagttctgaacagcaaaacctgcattgatttttccgtccattcctcctaaactcgagaatcttggagatgtatagtatcctgaaacatctaccgcaaaagagtttgccggtttaagcgttgtatctgtgttgaatcctccggctaagtctgaacggatgtatcttccggtaaccgccattgaatatgaatcggatagtttaagaccataagctacgtcgatggaaaattcgtttggttttgaggttcccattgaagttacttcgtttcctactaactgagtaaggtctacttctcccatattgaagtaataaatacttgcagagatggtagatctttcctcctgccctaagaatttgtggaaggctccgtataataaaaacacatcattggtaagttttcccatgtaaggcgtgtagtttagcccgacggaagaactcgatctgctgaaaggatatttcgctgcattccagaattgtgaaaaagcatccggagaggttaccacaccctgatctcccatacctccagctcttgcatctggtgcgattcttaagaaaggagctccggttaatacaggtcttaccaggcttaaatcttgagaatagcctaaaaaaccagcacttaacccaattcctaaaagcagtttagtagttaaattcatatgttgtcttttatatattatcagttttttgttaatattattactgttatcgttttaaatttatttcaaaagtaccattttttctacagctgtagcacttcctttgcatttttcttgattttgactttttgcaaatatcttaaaaatatacgtaccttttgctactgttgccccaaaatcgtctcttccgtcccattctattgcctgacgtggcgttctaaagccctgtaggaaaggttctgcaactacaggctgcgataaagttcttaccaattttcctgtaattgtataaatctgaacgtttacatccagaatatcgtcgcaattatgctcaaactgaacatacgttttgttcgtaaacggattcggccagttcagaggtcggttaattaccaaatgctgatccgcttcatccttaacttcaaaatttaacgtagcagttgtagaattattgtttatgtcccaaactttaaatgttaactgatgttgtcccaccgcaagatttctgaaaggatacgttacatttcctttctgataatctgccaaactcgggcttaaacatccgtttccttcacctgaagcataaaaatcattcagtacaattgtattgataatttgtccgtccaaatatactgtaatatcgtgaccaataccagaacctgtggaattaattcctgtatcatccgtaacgcaagccagtaacatcgggttctggtctgtgataccgccgtctgcgaagttggtattgttcatatacagttttacttttggcggttcgttatcattaattccgttcggattgatatctcctacctgaaccggctggttgttgaatacatcagaagatttattatccgcatatcctaaaattctgcctgtacccactgcgtagttgatgtctttcggaacataaaattctacagtgaaaactccgtttacagcggttccggaagcttttacaatagcacttccttcctcaatgtactgaagaaccggagttaatcctccgtcgttattcaaagtggttttgtttaatcttttatcaaaaatattaatgaccactcttccgttaaacgttgtatttaccgttccgttcggattattgatgtgtccttttacttttacaaaatccaatcctctgattaatcccggaaccggagtttcaatattgtcaatgactaataatcttttcggtctggtcagtttcattgcaggatctcctaggaaattaacctttaaatgttctgaagaagctcctctctgtttttttgcattcagatgggcatatcctaaagtatcgaaatcatcgttggtaagtttaaagatattttgcgtaaaaaggttggtaaagtctactccataacctacgtcgattgcacggctagaagtaatcatcgttgcaggacctccctgcttaagcttcataaactgttctcctgcagaagaaacgtcaggatcatcccaaagtgtgaattcgcaggtaattgtagatacaaacggaaatctgctgtacacattagagaaattattcgcattctgaatttcagataatgttaaaactctttcctgtgcccatccgttgattcctccgtgtccgaaatagaaaagataaaggctgtttccgatatcattggagatcgcctggtttacctgaggatatctttgtcctcccgctgtactttgtgcctgaaaagcatcaaggtaaagttttcttacgttatactctttaagagtcgtattattttgttcaaaaaccgttgccagagaattattcattacggtatggaaagggggacctccgtcgttatcatcatccacaacaaaatccagtttcattttccattctccgaaaggcgtagactgaccggataaactgttataataagctaaagtcttatcaatcatattggaagcttccgttgcattggcagccggaattctgcccacaggaagatctggaagattaaaatcgatgtagcttacagtctgtggttttgtcatcacaatataatcatcagtaacgaatgatcttatcacatcctgagaaatttcactctgatagctggatacgatattgttattacctgggattctgttcttataatcaaatgaggtatctcccaaaataaatacatatttcaatgttccgagtggagtattaagcttcgttaaaaaatctcttatcgccgtaagatctttgctgccgcttccgaattcattatagattttctctgtatctaccacctgtacattataattgtttttggtctggtgatagttggcaattctttgtgcctgtcccagcatttcaggagtggtgataattaaataatctacattttgtaatgctgagatattctggttattaattcttcctacaaatgaaggactgaatgccgcatccgctctgaaagctacaaattcattattgaagttcagattagatgctgtataagcaaaattaaatgatgcacttcctgctgctttatttacccttctgttggcgttggtaatatccgtaacgtcccagatctgctctgccgcagaagcattggaaagactgaaaccataagtggtattgcttccggtaaccagagaaaaatcacggaaactcatctgagtaccgttgaagcttaaattatctttatactgtacctcaaaataatccggatagaaagttccgttcggattcagggtaatatcaggtttcatattgatggtaatctgatttccgcttaacccggatatgactcccgaataattcataggataaaattcatatgttgaactcagatccggagtaggaaccgtaaaaggaatcggattttgattattgatgttataaagcaatttgttcttttgagatttatagccaataacctgtgctttatagcggatatcatcaccagactgaataggagaggctgtcgtaaaggtaaccgttttgtctgttacaaaaggagtatcttccacccatgttcttcctactctcatcaggtttttctggtctacattaattacctgataattatcaaatcgtgtgataagaggagtagcaggtaaattaacatctaccggctgaaccctctttccgggacctttatcaaaattgatgaagtaataagaataatcttcataaatattcttcaggttttcactcggatatgttctggattcaattcttttaataccgtttccgttcgaattattgtataaattgtagccattcggcccctgtgcgtagaataaagcataatcattatcattccatacaccgtcgtcttctcccactacctgaatcgcgttttcctgaagagcactgtatcttgcgtcctgattgttttcaggaagcatgattccgccgtttccgtaaattctgaaatttttaggatttacagaagaaggattgatgccgttatcctgcaaaaactgtcgggttattttaaatattccggatttatcaactcttattttataaaaagttcctgatgataaaggattatttgtagttcctaattttaaggtatttccataactgttggaaacattcgtctccgaaagttcaaatgaagacaatctttggatttgcccttttacatttttaaaaagagacacattggcgcttgcatatcttgctccgtcggcattataataaactacatcttttatctcctgatccgtaataagatccttacttaatgaaaacaactcccttgcagaaacattttcccagacaggattagaaacttttaactggttttcgccaacttgttgtttagttgtgataaaaatgttattttggctgaataaaaatccctgatttttaaaatttgggagattgagttttgtctcaccaaagtctcgaattttagcaccatcccattcgatagtgatcctttgagcccaaagtgttgatacaaagcttaataagaataatagagaaattttttgtttcatgtttactattgaaatttctgaattacaaaataaatgaaaattttataattaaattgtgatacaataaaattaatttgttaacgtttttcaaaaaaatcaactctttacttgatttattgaataatttattttttctttgtactttgaaaatatttatatcgactatgaaaaaactaaagttgttttcattaatagcattaagttctacacttgcattaaccagttgcggaggatctaataatggcggcggtactaaaaaatttgtcagcaaaacaggttggaaaccaaacgagaaacaaggttggttttttgcaggaaagcaacaaaaacaaaaaggttggccgggaatggtatatgtagaaggtggaacttttacaatgggattagtgaaagatgatgttatgcacgattggaataactcgcctcgcagaatgcaggtaagttcattcttcatcggggaaactgaaattactaactacgaataccgcgaataccttacatggttgaagtacgtattcccaccaagcgatccaagctttaaggaaatctacaacggtgcgttgccggataccttattgtgggacaacaaattatctagaaatgactacaacgagacgtatttccgtgctcctgaattcgattactatcctgtagtaggagtgtcttggactcaggcaaacagatactgcgaatggttgtcagacagagcgaacgagaaagctttaatgcaagccggtatcattgcgaaagatttgtatatcaacgaatctaataaccaaggtggaacagcattcaacatggataaattcaaatcgaatgatcctgaaatgcaaggttacatcaatgaaaaaagaatgcagcagaaaacaggtttgaaaactacaaaccagagattgttagctgcaaacagagctccgaacgctgcaatggtaacaaaattcagacttcctacagaagttgaatgggaatatgcagctttaggtatggctaaaaacagagagtacaatcagtatatgggcaaaaagcctgaaattgaaaaactgagaggtactaaaggaagagaaaaaggaatgttccttgaaaacttcaaaatgggaacaggagattactcaggtattgctggctggaaaaacgacggttctgcaagaacttcagacgtaagacaattcccttctaacgatttaggaatctacggaatgtacggtaacgttgcagaatggactgccgatgtttacagaccaatcatcgatgaagatttcagtgacttcaattactatagaggaaatatgccgcaggctatcgtaagaaacggtgacggaacttacaaaatggtagacgaaagcagcattaaatatgatactttagctgacggaagattagtttacagaaacttgccgggtcagtacgaaagagaaacaatcgcagattacagaaactacagagatggtgacagaatgtcttctttagaatacagaactgcatcagattctgctacttcttacgatatgtacaactctccgaaatctagatttattgtagatgctcagggtaaagtagtattgcaaaaagacagaaaagaaagaacttctgctgttactaacgacgtaagagtggtaaaaggaggttcttggcaggatacagcatactggttggatccgggacaaagaagatacaagtctcaggataaagcttacggatggattggattccgtgtagctcaggatgcgagagccaacgaaaaaggtagaacaagaagataatatttatcaaaataattttcaaaaaaccttccggaattctggaaggtttttttatttttgaactatgaatatagaacagttttaccctttatttttacaatccgaaaaagttaccatcgacagccgaaaagtcggaaagaatgatattttctttgctttttcaggagaaaatttcaatgcagcaacgttggctgaacaggcagttgaaaatggcgctttagccgtaattgttgaacagcaggaatttgaaaataaagaaaaaaatattttcttcgttcattctacactggagtttttgcagcagcttgccatttatcacagaaaacaattgcagattcctgtgatcggtttaaccgggagcaacgggaaaaccactacaaaagaaatcattcatgctgttctttccgaaaaatttaatgtacaatatacttccggaaatcttaataatcacatcggagttcctttaactcttctttccattaagccggaacacgaaatggcagtcattgaaatgggagcaaatcaccagaaagaaatcgctcttttaagttcaatttcccaacccgattttggctacattaccaactttggtaaagcacatctggaaggcttcggaggatatgaaggtgttattaaagggaaatctgagctgtacgactatcttaaagatcataaaaaaacgatcattgttaacgaaaatgatcctgttcaggttgaaaaaactgaaaattattcaccaaaaattactttcggaaaagaagattcagattatcagtttgaattattttcagaagaaaactttgtaggtcttaagtataaagatcataaagcagtttcaaagcttaccggagaatataatttcactaacctttgcgcggcggcgagtttaggtctttacttcggaatcgattttgagaacattaaaaatgccatccaaaattacacgcccaccaatatgcgttcccagattgtaaaaaaggaagggaaaacactggttttggatacctataatgccaatccgagttcaatgactgcttctttgcacaatttcatcacctttgaaggttcaaaaacgattattataggcgatatgttggaattgggagaagaaagtacggtagaacatcaaaatattttaaaaatagcgcatgatttgggtttcaacgaaatcattaccgttggaaatcattttaaagcagtaaataattcatcaaaatcttttgaaaacacagcagagttagtagaatatctcggtttaaacaaaataaaatctgaaaacatcttgttaaaagcttccagaggaatttcactcgagaaagcgattgattttatttagtatttactcccaataattatttaaatatgtagtaagaatgatttcccccttaatttaatctggtacaggagaaattttaattcactttgatttatcattttttaaatatttcttttattaaatggtttcttcgactggctgaatctgatagcaatattaacaaagtttaatctaacgatcattctgagccagccgaagaatagaaatagcttacatatctataatacgatcgatattcactgaaaaacctgctaattgagtttttctatgtttagagctgtgcaactgggtatcgtttgcatattcgttgcatcaactctctgcattcttattctcaaagcgcttcctgcagctaattgtataataaagtttctgccggaacaattattagatccattataagcatgaataatgatatttgaattgacgatttctgttccgccattttccagccaaaatctgctggagaattcattacttcctgcaggtatagtagttcctacagaataattaacccgataaacacctgcttctgataccgtaactgtattggaagccaacgtaaatatccctccaatatttgttcttccggttcctaaagataaagttgaagtaatattggtaatagtttgtgaagcggctgtatcataagcatcaaaaacctttagttctttgtaggctccgccatcggttcctacagaaattacattattggcatttgcactcaccacatttgccgtagcggtagttgcatcttcttttatataagtgataacacctgttgtcgcattttgattaagatttgttatcgtttcttttatatctgtaaccacattgttctcattagtgtaagtcgcgatcgtttttccggcagtttgtgtattcgtgatggtagttatattttgtaacgaacttaaattttgtgttgtaataactccatttacatttgatgttaagacagaacccgataaacttaatgtatttgaattaacaataggagcggttgaaattactccgtttacatttgaggtaacagtatttccgctggtggaaatgctattggtggtacttgcaggagcaatggcttgaggaatccaggttgtgccattccatgttaatacttgtccggtagttgctccctgctgggaaattctcaattcgtttccggtacttccgttaccggataaagtgttatttgttagtattttagcatttcctgcagaagcctgtgcaacaacagcatttgccgatacatattttactacaccatccgtatcaaaaaccataatggaatcttttgcagattgagaggaaccagtctgggtgatttttctaacgcgtaacgtaccattaatatctaaagtgtgggtgggtgaaggtgtatttatacccatatttccactctgagcattaaaaaataatactgtaaacaatagtacaacaaaggaatacgtttttttcataattattttttttcgagttaacattatcttgatactaatttttcttcgatgaaaagatcagtactcctgagaaacaataaataaaaaatgaatttttcatatctgatgattatttagatattaactaataatcaacaggtatgctttgttgtttaaaatattgattttaaatagtttatagattatgtcttgttttaaaaattccaaaatatagaattttttacattttttggatttttttgctattaatgggaaatagtaaaataaaagtaagttcgacgtaaaaacaacacaataatattcaatagaaattagctttagccaaaacttatactaaatttcggttaaagtcaattttgattttaaatattaccattgaactgaaacctaacgcaatcaatgaaatataatggtttgattatgagttgattttattaaataagactcaagttaacacaagaacttttgagataatatttgaaaattacagaaaaatgaatcgaaattctcgttttcaaacaaatctactgatgtagaaaagaatatattttaagattaagtaaaaggtaaaaaagaagaggtaaaatcattgattgatagctgaaaatggcttgaaaaaaatatctgaaagcattctaactttaataacccactaaaaattaatgggtctcacaatattgaaaaaaaatggtttatgcctttttctcccagaactcgttaataattaacttaatatttttaaatgtactcggggaaacttcgctttcaatttgtgcagtatttttccaggcaacctccgtaatcccttcttcaatctgaggttttgaagtatcttcaccatcgaaattcatttcaaaccagtgcgtacactttaagactttatcgccgtttctttcaatgtaaatatgataagttgtattgataaaccttaccagttctacattagaaagtccggtttcctcttcaatttcgcgtacagcagactcttcacgcgattctcctttttccattttgcctttcggaagatcccattttcccagtcttttgatgaaaagaatttcaccttcaggattatttacaattcctcccgctgcttcgataatcctgaacagcttttgaaattctgcccatatttcatcgatattctcgccgaaaacattcaattctttcaccgatgtattttccagaagatccaacgcgatttccaggcttgtgacgttttcgtatccaagcgttttttctaagttttcagattgcttagacaacaataattttttttcgttcacaaaaactttatacatatatttgtaagaattaagaatttaaatacaaaaataaaaaatgaatttagaaggacgaaagattattgtcaataaatcatctaaagacttggtagaaatcctgaaatcgccagaaaattacaaagatttcatgccggatggtcttcagaaatttgaaacgagagaagatggatttaaattcgggttgcagggaatgccggaaattgctctgaaaattgatgaagtaaccgatgaaaaagcagtgttgaagtctgcaagttcaagcttagatttttctttaacagcggctttaaaacctctaaatgaaaatcagaccgaagttcagatgctgtttgaaggaaaattcaatccgtttattaaaatgatggtagaaaaacctcttcagaatttcattaatacacttaccgataagatcgaagtttacaaataaaacgaaaaccttcagcaatgaaggtttttttgtgctttaaacaatgattcccgaactgtggtcacggaaacttcccgttgcagaacacagaacattaatttcattattgtatcttaaaactcccatcaatgcaaagattaaagcctctttataatcaataatctctttttcaggaataacgatttctgtgttggctttggtttttatcttttcagttaaatattgattatacgttccgccacctgtaaaaagaacgcgtttgagttggtaattattaaaaatttttgaaatctgttccgcagtatgctctgtaaaggttgccattacattttccgtttcaatatctccaaaaagtggaaatatattttcgttacaccactcaattcccaatgattttggatgagactggctgtaaaaatccagcgaatttaattttgacagtaaatcctcattaatttttcctgttctcgctaaatcaccgttttcgtcgaaatttttattgaatttctgagccaatttattcaggataatattgaccggagcaatatcaaaagctattcttttctccccaattttcattgaaatattagaaaatccgccaagattaagacaggcgtcgtattccgaaaacaataattcatcaccaatcggaacaagcggcgcgccgtttccgcccatcaaaacatcctgacttctgaaatcgtaaatcacaggtaaatttgtttcgagcttaattgctcttccgtcgccgatctgtaaagtaaattttttctgaggctgatgaaaaaccgtatgaccgtgagaagcaattaaatctatgttcccaatctgatgcttttcaataaaatttctgacagcttttcccaaataaaaaccatattccgaattcaattccaacagttcttccgcagaaagatggatcgaatttctaagcttatcttcccagtttttagagtaggaaagggtttctgctttcagaattttgaatgtccattcatcctgtttttcaaatctggcaaaacaaatgtccagtccgtctaaacttgttccggacatcaatccgaccgcatggaaaaccatttgattattttttgttttgagatatttcaggcgcagcaaaatctcctgaattctggaagaaaacatattcggaaaaatcatcttttgcacgcattccgtgtgcaccgatcagcgtacttccgtcttttctcgttacatacactgtatctttggtgtagatattcttctttacctgatcccagtaaatgctctgcatggcaaatttatcgccttcattggtggtaattcttacgtttcctttcgcttcgtaaaattttttgtaatcgtagaatttagcgtattttgctttaattgttccgggaatttttggctttttcttgtcgaaaaactgaatgtcaattcccttccttgcaaccgtataaggactgtcgatcagctcatatttttcaatgattggagcttttgccctcatcgtcacaaacccggaatctctctggatgatatttgcattattaatgatctgtgaagggaaatttttgctttgtttgcctttatttttcgtaagatcttcttcacaggaagttatcacaaaaaatatagcacaactaaaaaggtatgctatattttttttatatgatatgtttctaaataacttcattttagttgtatagagtctttctgaaccacttatccgcaaaattgaaaccaactctcaggtttataaaattctgattgatcagattatttttagtagttcctctttttcctacttcaagaccaagttccagaccgctcattctcgttatgctgctgtttttaaacggaagaagaactcccccggaaataccgaacttattaatgttctgccctgcaatctgaagatttcctttctcataaaaggctccgtatctgtaaacgattctcgaaaaataacttctgaaattattataattcggtaaataccaacctccggcagaaattctgtacgaatcctgaagatccagcgtacttccgaaataattaatattttccccctttttataatctccctgaagagaaacaaaccatctgttttcttctccataacctacccctaaagaagcctgtaatggcaagagatttttagattttgtacttttctggtcgataatgctttcattactttttacagtagcacctgcatcagaatagaaatacgtactgtttacataatcggtcgtcatgttactcgtatttccgaaagtagtagtagctccgatcgtaagttttttgtctgtacttgtattcaggttctggtagcttgctcctaaagtaaagttgaaattgtggatgctgtttctcgtttcgtatccattaattaattctgcattagaataagccagttcattaaggtcataaagattcccgaaataataatttgctcttgctccaacagcaagtttatcgttcactttatatcctaaagccatctgtaccgtattcaaagttccgcttcctttaaatctgttggctctgatattacctgcagaaagcgtatctctgtggataatatcgtagctttttgagctgtaaggctgataagaaatccccatcttcaattttggagacagagggaaagcaatagaaatattagataaatacgtagaatgtttggtagactttgtattattatagtttgttttaaagtaattgttttcgttggtagcttccagcttaatacttgtaagctcgaaattagcattgtttgcagggtttgcaaaattgaaattacttgtaaaatcgcttataaaagcggtagatatacctcccattgaggtagtttcgatcgtattatcatattttacatctccgattccgtaagttgcataaggagagttactcagattctgcgcgttaaggaaatatccaactgatatcaatgatagtacaaagatttttttcattctttatttttaaaacaatgcgcaaatatcttaaatattaatgaattgtaaaaattataagaggttaaagtttgttaagggggatgaatagctataattatgatgaattcttaattgtaaattcgctttggttgtgaatttttatacattatctatatactgcatgataaaattcacaattcatttgcaacgcaaaattcacctgcaaagtaaaaattcacattctgcgaattacaaatttcatatctttgaatcatgaattgggagaacattgccggacaggaaagtctgaaaaaacttcttagagacagtatcgccgaaaacagggtaagccatgcccagcttttcgtcggcaaagaagggtacggaacattgccgatggctttggcatatgccaaagaaattctgagcagcgaaaatccgcacgccggagcaaaagtagagcatctcaatcatctcgatctgcatttcagttttccggtttttacagacaataaaaattcattaagtaaaaataaatttgatgaattcagggaaatggttcttaaatctccttatgcgggatatgacgaatggacagcggttttggaatccgaaaataagcagctttttatttcggcagatgaaattgatgaacagaaccagaaattttcactgaaaagttttgaaggcggaacgaaaattttaatcgtctggagagccgataaaatgaacgtcgctgcatccaacaaattcctgaaatttttagaggaacctcctgcgaaaacaatcattttgcttaccgcagaatctaccaacgatattttaccaaccattctttcccgaacacagattgtagaagtaccgagaataaacgatgaagatctggaaatttatctgaaaaaaaactataatctttcagaagacaagacaggggaaatcatccatcaggctcagggagaccttaatgaagccttaaagcttttacaatccggaaacaaaactgatgagttcgaaaaactctttgtacagtgggttcgtgatgcatttatggtaaaaaagaaacctgaatttctacgaagcatcattctttgggcaagagaaattgcaggctggaaccgggaaaagcagaaaaactttttaaattactgttccgagattttcagactcgctttgcttcagaactatcagtcggagaatttagtctataaaaagattgatgccaatggtttcaactggatgggattctcaaaattcatcagcggagccaatattgaaagcattctggaagaaatcaataccgccgatctgcatttaacccgaaacggaaatcctaaaattgtctggacggatctcgggataaaattatcaagatacatacataaaagctaaataaaaaactccgaaataaattcggagttttttattgttaagctgttttctttactttggcagcttttttatcggtagttttagaactgttttctgctgttttgtgtttagcatcacagtttttatgatctccacaggcttttttatcttttgtggaacattctttcttgtcttttcctgcgcagcatgcgcctttcggagtttcctgtgcaaagttgaaagtgaataaagtaagggctaaaactgaaattatttttttcatgatctaaatttttaatgaatccaaatatagtaatttttctattcggaggaatttaagattaaaaaaaaattaaactttattaaaaaatcaatcaatcgtttgatttatgaaaaattggttgtagatttgcacctcgaaaaacagatacagagtaaaagatgatttcaaaagaagagaatatattatttgccgcagaaaagcttttcgccgagaaaggctttgagggaacttccacaagagaaattgccaaagctgcaaatgtgaatatttctatgatctcttattatttcggttctaaagaaaaactgtacgagaaactggtagaatacagaatgagcgagggacagtttttttccaaagatattatcgaaagaaccgatatcaacgaatgggaaaaagttgaaaaaatcgtagatcagtttgcaggaaaggtaagacacaacaaatgtttctacagaattatgcagagagagcagcttcatgcagaaaatccgcagatcgtagaatttctcaaagaaaccaaaatgggattcatttccatgtattcaaaaattttggaaagcggtcttcagaaaggaatttttacaaaaaatcctcccatttatctccttcattccacggtgagcggaactttattttacgcttccaacgcaaaagaaatgtataaagaattcctgaacgacaccaacgaagaagaaatatttgatgaaaaatattacacagaacttaataaacatattaaatatctactaaaagaccttctaggttatgaagaaaataaataattcagtccttgcgctcgctctattcgtagggattgcaaacgcaaatgctcaggagaaaaagaccctcactcttgatgatgccgtgcagttgggaatccagaacagcaaaaatcttaaaattgatgctgcaaaaatagaagaagctacagccaatcttttggaagccaaaaacagacagcttccggagctgaaaatttcaggaagctatatgtatcttcctttaaaaccaaatattgatattaaacttcccggagtttcaggagcaggaggtccggaagttcatcaggttgcctacggatcagcgaatgtcagcgttccgatttacagcggaggaagaataaaatacggaatagaatctgcaaaatatttagtggaagcatctaaattaactactgaaaacgataaagtagccattgcttacaatgttgcgcaggcttacaataatttatttaaagccaaccagtccatcaaagttttagaagaaaaccttaccgcttcccaaaaaagagacgaaacgttccttaaacttgaaaacaacggagtaatagcgagaaatgaccgtttaaaagcaagtttgcagacttcaaacatcgaacttcagttactggaagcaaaaaacaactacaatattgccaatatcaatatggatttattgcttggacttccggaaaccacagaaatcgaagtagaccagaattatatagatgaaggaaatgaagtaaaaccccttgatttctatttaaatgaagccagagaaaaccgtaaagatcttcaggctttggacaaacagagacaggctgcagctttgggaacaaaatccgcgaaagcagaaaatcttccttccattgcttttacaggaggttatgtggcggcagatattccgaagtttttaacgatctataatgcggtaaatgtaggcgtaggaatttcttacaacttatcgaatctgtggaaagaaaactcttcactgaagcagtctcaggcaagagaaatgcagttggctgcaaccaacgagttgttaaacgacaacatcaagctggatgtaaacagagaatatcagaacacagattattctaaaaagagaattgccgttttcgaaaaatctgcagaacaggctaacgaaaattacagaattacaaaaaataaatatgataacggtttggctacgatgacggaacttctggatgcagatgctgcacagatttcagcgaacgtaggagtgatcaatgcgaaagcagatgccgctttagcctacagaaaactattacagaccaccggaactttaacaaacaaataaaattaagaacttatacccacaatggaaaataatactacacaaacggctgaacctaaaaagaaaaaaagtttagttttccctatcatattagcagtagttttaatcggcggaggaatctacggttacagaacctattcttacgggcaggttcatgaagaaacagacgatgcacagatcgcttccaatatggctcccgtaatttctaaaatttcaggatacgtaacggaagtaaaagtgaaagacaaccagtttgtaaaaaaaggagatactctggttattctggacagcagagatcagaaaatggctttacagcaggcagaagcagctttggcaacagcaaaaagcagcatctctaatgcacaggcttccacaacggcaacttcaaaaaatataaattcttctgaagccgctgttactacggcgaatgcacagattgaagccgcaaaagtaaacgtttggaaaacttctcaggatttaaaaagatatgccaatcttgtgaaagaccactctattacagaacagcagtatgagcaggctctggcagcaaaacagtctgcagataagcagcttcaggttttaatcgatcagagaaaccagattgcacagcaaaccaatatcgcttcttctcagaccgcagcaagttctcagcagatcggagtggcaaattccgttgcaaaacagagagaagtggatgtagaaaatgcaagactgaatttatcttacacggtaattgtagcaccggaagacggatatgtaggaaaagtgccgattcaggcaggacagtatttacaggcaggttcacaattgttttctttggttaaaaatgaccagaaatgggtaattgccaatttcaaagaaacccagattgataaaatgatggaaggacaaaaagtgaaaatcgagattgatgctttcccagacagagaatttgacggtgtggtaagttctttctctccagcaaccggagctaccttctctatacttcctccggataatgcgagtggtaacttcgtaaaagtagtacagagacttcctgtaaaaatcgattttgtaaatctggataaaaatgtatccaaaagattaagaacaggaatgaatgtaaaagcagaagtttctttaaaataaaaatataaaataagtgaattgtcagcaatgcagaagcagatcggttatgagatgtaatgaagtagtagaattgacaatgaaagattgataactgcaattcactttttttcaaaaaaatatatgattatctgtaatttgtcataattgaaacatctttgagtactttgctgagtgaatagtttatgctgagcttgtcgaagtagctttgcaaacttaaaaacagttagtatgtaaaagaatcttagtgatctttgcgttaaaaagcagtataattaataacggattatcaaaaaaatatataagtgaattgtcaatttttgaaggagaagtcattttttaatgaaatgaatttgaagattgatgatgaagctgatgccggataatgaagagagatcaatgatagatgtggaaatgatgaagttgatccatgaagaaagttccggtgtaatgcagaaagatcatgaagaggaaacaggaaatgaagacgataaatgaagcggttgccggatatgaagaagaaaattgatgttgaaatgatgaagctgaacgatgcagcagaattccggtttaatgaagacagatcatgaagaggaaaatgcagaggtaaaaataagaccatgcagaggatgattattgacaattcacttttttaaaattgagaaatttagagatttggaaatactttgatgaaattttaatcagctaaatttttctgaaacctcatctcatggatgagagaacaaagttggttcgtaaaaacttgttcatatttccgaatctcaaatctcttgatttttaatacaacactaaaaaaactatgcaagattcattagtagaatacggagcccgaagagtaatcattacgattacggcaattctttgtgctttgcttgaaatagtggattccacgattgtaaacgttgcccttaatgaaatgaagggaaatcttggagccaccctttccgaagtaggatgggtaatcaccgcatatgcgatcggaaatgtaattattgttccgatgacgagctggctttcccagcagttcgggcgtagaaactatttcgcggcttccattattatatttaccgttttctcctttttatgcggaaatgcaaccaacatctgggagcttgtatttttccgtctcatgcagggaatcggtgggggagcgcttctggtaacttcacaaaccatcattacggaatcttatccgatggaaaaaagaagtatggcacaggcaatttacggacttggggttattatcggtcctacattgggtccgccgttgggaggatatattgtggataattttagctggccgtatattttctatattaatattccgatcgggattgcggcaaccttaatgacgcttcagtttgtaagaagtccgaaatatgccgaaaaacgaaagatttccgatgtagactggattggaattgcattattggcaattaccgtaggttccttacagtttattctggaaagaggtcatgaagaagactggtttgccagcggaatgatcgttttctttacagccgctgcggttttaggatttatccttttcctatggagagaacttacctttaaatatccgatcgttgaactccgtgttctgaaaaacggaaacttaagaatcggaaccgtgatgtccttcgttttaggatttggtttgtacggatctacatttatcgttcctttatatacacaaagtattttgggatggacggcgcttcagtcgggtgctttaatgattccggcagctttaacgacggctttcatgatgccgattatcggaagactgctttcgaaaggagctaaacagcagattttggtttcactgggattatttatcttctttatctacagtttctggggatataaaatattaactccggatacaggaaaagatgccttcttctggatgctgattgtaagaggagccggattgggtttactgtttatcccgatcacctcgctttcattaagtacattgaaagggcaggaaatcgggcagggagctgcatttacaggaatgatgagacagcttggaggttccttcggaattgcggcgatcacgacattcattgccaatgcgagtcagaaatacagggtgaatcttatttcgcacctcgaccagaccgattttgcggtacagcagagattacaggctctgaaaggcagttttatcgcaaaaggaatgactcccgatgctgcaatgaacgccgcctacaaaatgctcgatctttctgtaacgaaacaggcaaccgtactttcttacatggatgttttcctttatcttggggtaatcttccttgtctgtattccgttcatcttatttattaaggaacgaaaaagcaaagaaaagattgatctgagtggggtgcattaattaaaatgcaaaaaatctctaaatcaatataatgaatatgaccgtttcacaaatgagacggtttttttaattaaagtgagtttgatttaagccataattataatttttgatcaataatctccgaaaagatattaattgatgtttttatcaaagaacgaatatgctgccaaagcagatagagaatattttttcatgatattttttcatcttttagatcggactcgctttaatttccagaaaagcgaattgacaataaaattaattgacttgcaaagcaaaattcactattcaaatcattaaggattactgataatcaacgttgacggaatatccgataaccatatgcttttcgtatcgatgaggtttttccagcttttgctgctgatgagcattaaatcctgcaaattcagaaattctttctcaatttttttctcattgtataaagtgatgtgattgggcgcaacctgttcaatgcttcggatgagttctttcacttcaatattattccggatctgtcctgcaacatctaagataataatctgggaattgttattattgatgagtcttttggcatattcaagcagataaaaatcgcttaaattaaaaatcgggacaaaaactttgtctgcggaagtaaattctttttccactagaataccaacaggaatctgggttttatccagaatctgtaatgtaaaatcgtcaaaaggagagttgttgaaaatatttcctttcccttttaccgtatttaaaagtttttccggattaatgatcttcgtcgtaaaacctaaaagtctccccaacagacttccctcatacatcgattttccgagcataatcagaagaagatcgtaatttcctttgtttgtaatgtgtgtaagatcgttttcaatatcattggaggctttaaaaagcgttgtgacttcaagattcagatcattggaagtttctattacatttttaaactgctcattttcgtattcattaatgtcgtaagcgtgcatttcgttcacgggagcaatattcattgcggtaatgcttttattgccgttcattttatgggtgaaatcatgagccagtttcagcagtgtacttccggattcaggatggtcaaaagacaataatactctgtattttgcatcatttaccggagattcctcatcatcttttttagatttaaatataaaattgatgaaatccagcgcaggtcccgtcatgaaagttgtaaacagcgccataattaccatcatagcaaatatctgaggacttaaaacgcccagatcataaccgatattcaggacaataagttccattaaacctctggtgttcatcaaggctccgatcgttaaactttctttccagttgatgcctaaaaattttgcggttaaggcacttcctgcaaattttccgatcactgcggttaaaatgatgaatcctgctgtaatccacagatgactgtcattcaatagcccgatttgggtacgaagtcctgtaaatacaaagaaaaggggcagaagaagaaccaatgccacatcttccactttatcaataaacagtgttctgaattttgcattttcaggcataatcgctcctgccataaaagctccgaaaagcgcatgaatcccaataacttccgtagcataagccgaaagaatcaaggtcaaaaagaaaatcgcaaccatgggtttgttgatggtactttttcctgcctgtaaatctccgattcttttcaggaacggtcttacaattttaatcatgaaaaatacataggcaattgccatcagaattacatagagtgaactttcgaacgatcctgcttttacaatagcaattacggctgccaaaatacaccatgccgtaatatcatcggctgctgcacaagtgatgactaccgttccaagtttggttttctgaagatttctttcctgaacgattcttgccaaaacaggaaaagcggtaatactcatggcaatagcgatgaaaagcgcgaatgaggtaaactgaattccttccggtgcaaattctttataaatgaaataagacagaccaattcccaatgcaaaagggataataatacttgcatgacttatgactaccgcatcgtgtgctttttttcttaaaacacttagatccagttccattcctacaatgtacatgaaaaggataagcccgatctggcttaaaaactgcagatttcctaaagattctttcgggaaaagaaatgctgaaaattcggggaagtacattcctacaagggaaggtcccagaacaattcctgcgatcatttcaccgatcacggaaggctgcttgatcttcatacaaatccatccgaaaagtcttgcaacaagaataatcgtaacgatttgcgccagtaataaagctaaaggatgatgaagattggtcttgaatgattctaaaaaattgtcccaactggaactgttgtttgtttttgtaatgatcttttctccgatttccaaagtctgcccttcaatgatgaaaaaatacatcagtgatgaaaaaacaataatggtggaaatataaaagatgatatttctgtattttccccaattcatgattccaaattttagacaaaattgctaagaaaatcggaaaaaaaagatgatttttaatcaaatgtaatgaaaagaaagaattttgcagtgaaatctaatgtcccaataaatcggaaagagatttcctgtaggtttccccgatctgaagctttaaaaagcggtcatttcccagaaaaacagtagtaataatttcgttggtggaaaatattttaacagcagataaagcaacaacttcttttttgttgacctgcgcaaaatcttttgcgggaagcatttccagaaggtttttgaaattcagattttttaaaacgatagtggttccatccttaagaagaatttctttgtcccgactgtcgatttccgaagttttgatgtaggcgatctggtccgtaaaaattacggttttgccgatgttggtattccactcgataaaatcttttttatgggttttccgaagcaattcttccgctttttcgaaagcctgtgctaacctttcttttttgatgggttttcttacataatccacaacattcaggtcgaaagcttcggctgcatattctttgtaagcggtggtaaagatgattttttttgaacctgaaatggcttctgcaacctgcaatccgtttattccgggcatttcgatgtctaaaatacagacgttgcagtcgatgttttcaatttcgttcagaaaaattttaggatcattaaatgcttttacaacttctacattttcaatctgttcacatagaagttttaaatagctgattgccagtaattcatcatcaagaataacgcattttatcatagaaatctcccaaattgattgttaattctgccgtgaagataccgttttttgaacttttctgaagcgtgtaaaaattattgtagatcattttcagcctttgatccagagactggcttccgaagccgcttttttccttttcgagaacatttttcagagaagctttattactaactttcatcgtgaaaattctttcttcaagttcaagctgaatggaaataaaagagtctgaagcaaggaaatcggtgtgtttaaatgcattttcaatcagatctaccgaaagaagaggggcaaaaactttctcttcgtaaatttcatccgatttattgattttcgatttaattctgaaatcaaaaagcggatttactttaattttgttgatctcaattaaacttaaagcaaaatttaattcttctttcggacttacgaatttgttattactttcgtatagaatatagtctaaaacattcgcaagtttatccagcgacatatatgtctgataagcatgagactgtaccgaattcaggatgtttttgaatagatgcgggttcagcttggttccgatgtgttcaagctgtacttcattcagtctttcctgaatcattttattggcagtcgaaagcttggcattttttactttaaatttctgattttggctgaataaataaatgcttaccgttaaaaaaaagaaaaccgcaaatactccgatgaatatccaataatcatgaatcatgtagtaattgccttccatggattgaaaatttatttacttctttttattttctattttaaaccaaacactcggtatttgcgacatgtcatgctgagcttgtcgaagcatctttattttttatttaaacgcaaagttttaataaagataattctaaatttaaaagaagcaaaggtataaatgcttcgcaaagcagactgataatttatttcaatttcttcaaagaatttaccgttacgctttcctcgcatttttcgaaagtaatttcgaaagttgctttttcttcgggataggtgagaagataatcaggacagggttttttctgtgcgtggcttctgtcgaaatcaatctttcctttggtgatgatactgtctttcagaaatttttcatcaacttttaatgttgccatttctgtttttgctgtttcagaatatttaaaatctttagacagggtttctgcaataacgcggctgttaggtagataaccgctgcagcttgcgccttttttgtttaagataaaaaatacaataatacatcccggtacaagaccgattgcatagaatttcagttttttcattagaaaattaaaagattgatatcgtgataagtaagtccgaaacggtcgcagatgattttcttcgtgtgtctgcctttgtacatataaagactctgtttcatttcgtttttgcgaaccagcatattttcgaaaccgccttcttcatcgtaatttaaaatataggaaaggaaaaaattggagatcgcttttgttgtggttctcggcattcttgaagtaagattcggaagtccgcagtggattacgccgtgcttaatgatgtatggatcttccatggtggtaagttcggaagtctcgattacttttccgttgtcgatggtgatgtcaataattacgcttccttttttcattttcattaccatatcttcggtaacgatgggtgtcatattcagtcttggaagggctcctattacaacatcggctctccttaaagcttttttcagttctttcggatcgataatagaagtaggaactctgctgtcaaccaaagtatgaagtcgtcttaattttgaaagtgaattatcgaaaactcttacacttgcgcctaaaccgatggctgcttttgtggcaaattctccaacgattcctgctcccaaaataaccacttcagcgggtcttactcctgtgattccgcccaacattaaaccattggataaagctaaaagctcagaagcataaagaatggaaaccgttcctgcaatttcgccgaccagtcttactaaagctaattgtttgtattcgtctacaatgaattcgaatgcaatggcatttacttttttctctgcaagctttaagaaataatccttatctctcaaattgatctgaagtgccgatacaagataggtattcggtttcatatactcaatttcctcttctgtcggcggattaacttttaaaattaaatcctgcccgaaagcttctttcggatcgtttgtaattctcgctcccgattcagaatattgcagatctgtaaagaacgaaccttgtccggctccggattctatgattatttcatgaccactttctaccaaaacctgtaccgcatcgggcgtgatgcaggttcttctttcattcagggaagtttccttaggaattcctatgctgaattgttttccttttttaatgacctccagtttttcttctttcggcatcagttcctcttcggtaaaaggagtaaaaatgtttgtagtactcatccttttaaataattaggttcttacagatcgttattttacattcaaattcaggagcaaagatacataatatttactcgaatgaaatttctctgctttctccggtattaatgatgctcatttcgtggtatttgagaccgtaaagatcttcttcgtagacttccggccattcgataatgcaaagaaaagaatggtctaagtattcttccattccgatatcatacacttcttcaatgttttttaaacggtataaatcgaaatgatatacttttccttttggggtattgtactcattgacaatagaataggtgggtgaatttacttcatctgtacttcccagatttttaagcagaaactgggtaaaagttgtttttccggcgcccagatttccttttaaaagtaaaatgttatgctttaattttgaaatgacggtttcggcaatattctgccagtcttccatatgttgaatcgtgaattgcatatttttaaacaaagataatgaattacggtaaaaaattcaggtgtaaaattagatcaaataattgtattttcaatttttgaggtcattcaaatcaattaaatttataaaacttttcaggataattttaagatgtttttatactgaatttatactgttctctatagatttttttgtatatttttgcagcatgatttccaaacagaccatcgataagattttttctacaatccgcgttgaggagattgtgggagaatatgtgcagctcaaaagagcagggtctaatttcaaaggattaagtccttttcatgacgaaaaaacaccgagtttcgttgtttcggcaagtaaacagatctggaaagatttctccacaggaaaaggagggacagcgatctctttcttaatggaaatcgaaaatttcacatatcctgaagcacttcgtcacgcggcaaaaaaatacggaattgaaattgaggaagatcagaaagatttttccgaagaagcaaaaaatgcacagtcggaaagagatctgctgtataaaatccatgaagtagcgaacgatttttttcagaatttcctttgggaagtggaagagggaaaatcaatcggactttcttattttaaagagcgtgaacttcgtgatgatatcattaaaaaattccagctcggctattcgcctgaaaaaaagaatgcctttacagaatatgctttagaaaaaggctattcaaaagaaattcttgagaaatcaggactttcgatttttcctgagaattctcccgccggaatcgaccgctttcgtgaaagagtaatatttccgatccacagtttttcgggcagggttttaggttttggagccagaattcttaaaaataacgtaaagacagccaaatatctcaactcaccggaaacggaaatttatcataaatccaatgttctttatggtttaaaccaaagcaaacaggcaatttcgcgtaagaatgtctgtcttttggtggaaggttatatggacgttatttcgcttcacatgtcgggaatcgaaaatgtggtggcaagttccggaacttctttaacgacggagcagattaagcttatcaaaagattaacagagaacgttacgattctttttgacggggataatgcaggaattaaagccagtttcagaagtattgatatgcttttgacggaagggatgaatattcgggtgatgctgtttccggacggagacgatcccgattctttcgccagaaaacatccgcaggaatatgtggaaaaattcatcgaaaatgaagcgatggattttattgattttaaagctgaaattcttttcaaggaaattggagacgatcccattaagaaagctgaggcgatcagagacatagtgaagtcggtttcctttgttcagaatgctttgaaaagggaggtttacttaaagcaggtttccacaaaattcggactttctgagcagagtctgtttaatgagctggatgttcagaagcagatcactcaaaatcagacgcataaagcgcagattaaagcggaagcgcaacaaccggcgaagcttgaagtggttaatgatccaagagattatatagatccggtactttttaatgtaacgaaacttgaaaatgatcttatcaatcatatgctcaattacggagatgttgttcttcaccgcactgcgccggatcagcagaaatatgatattacggtgattgaagaaattcttcaccattttgaagaagacgactacgaatttcaagtggaactgaacaaacgaatcgtagactatataaaagaaggaattgagaaagaggaactccgaaaaggaaatttctttttcggattaatggatgaagaattgagcaaggcagccgttaattccatgaatatttacagtgagctgaacgactggaccacaagaaatattttttcgcccaattacggggataaaattccggagcaggtggcaggagatattctgattcataaattcagatatgttaatttccttatatcaaaagcaaaaggagaattggcagaatatgcagaatccgatgaatctaaatattttgaacagcttaagaaaattcagatgctcacgatggtttcaaaagaattggctaaaattttaaattattctgcaattactggtatttatactgacagataataggaaataatctgttaattattgaaactttatgacaaaaagtcttataaaattttaggaataaaagttgtaaattcaacctcgtaaaatgtaatacacaaaacaagcatatggacattaaaaaagaattcagagatttctctgtaaaacatctgggaaataacggtttggcaaccgatcagtatatgggaatgtatggtcctacaggtcttacgccgtacatcatggaggaaagaagattaaacgttgcacaaatggacgttttctcccgtttaatgatggacagaattattttcttaggaacaggaattgacgatcaggtggcgaatatcgtaaccgctcagcttcttttcttagagagtgcagatccttcaaaagatattcagatttatatcaattctccgggtggaagtgtttacgccggtttaggaatctacgacacgatgcagatcattaagcctgatgtagcaacaatctgtacaggtattgcagcttcaatgggtgcggttcttttggttgccggagaaagcggaaaacgttctgctttaaagcactcaagagtaatgattcaccaaccttcgggaggtgcgcaaggggtggcttctgatatggagatcaatttaagagagatgttaaagcttaaaaaagagctttacgagatcatttccgagcactcaggacagacttatgactgggtagaaaaagcttccgacagagattactggatgacttccgaagaagcaaaaggatacggaatggtagacgaagttttacagagatccaaagacaaaaaataaattttataaaaataataataataagacgcatcaattgattttggtgcgttttttttatgtaaattatatcaggagctttttccggctttccgcactcgctgtttctaatatttagggttgcggcggcggagccgccgcaaccctaaatattaaaacgagctcagacaattgctgcaatccgggctaggaaagtcgatgtattttcaattttcacatcaatatcgataaaagtaattttcagaccccaaataaatactttaacaaattttataaaatttgagagtaaaaacggtatcattttttcaagataaccggtacaacacttaaatcataaaaattatgtcaaagaaaattgcaattttagcaacacacggatttgaagaaagcgaattgaaatctccaaaagaacatttagaacagcaaggctggacagcccacatcatcagtccggaatccggaactattaaagcatgggcagaaaaagactggggacaggaatacaatgtcgataaaactttagatgaagccaacgcttcagactatgatgcattggttttaccgggtggcgttatcaatccggatcagttaagaaccaatgaaactgctttatctttcgtaagagattttttccaacagcacaaacctgttgcagctatttgtcatggaccacagattcttattaacgccgaggtagttgaaggaagaaaaatgacatcggtagattcaatcagcaaagatcttaaaaatgcgggagcgaactgggaagacagcgaagttgtggtagatcatggtctggtaacaagccgtactcctaaagatcttccagcctttaatgcaaagatggtagaggagatcaaagaaggaaagcatgaagagcagaccatctaaaatacaaaagcacaaactttaattttacaaactctgattataaaaaatccggcggcatcgaagatgccgccggattttatttttcattttctgtagatcttctctttttaaagaacatcctgtaaatcaaaaatgtctgtatgaaaacatttcctaaaagtatcaggaataccttataaaaaggaattggcgcataaaatggcagtaacggatcaaacaatactgcaggtgagctcgccaaaactttaattatcgataacggatactgcaaaaattcaggttttataccgatgaaaaactggtcgtagataaatacataaagaatatcaaatattaatattcccagaaacagcagtataaattttttcacagccttattttcgattaattaaaagcctcaataattttagaaaaatcttccagttttaaagcggctccgccaatcaatccaccatcaatatccggctgagagaatatttcctttgcattatccggttttacagaacctccgtaaagaatagaaacttcatcagcaacttcctgtccgtattttgcagcgataatacttctgatgtgagcatgaatttcctgtgcttgttccggcgtcgcagtttctccggttcctattgcccaaaccggttcgtaagcgatcactacttttttaatttcctccgctgaaagtgtgaaaagggctacttcagtctgattttttaccacttcaaaatgctgtcctgcttttctctgctccaaagtttccccgttacagtaaacaggaatcaaacctttatccaaagctaattttacctttctgttgcagtgagaatctgtttcgccgtgatattgtcttctttcagaatgtccgattaaagaacctgttgcatcaatggattcaagcatatccacagaaatttctcctgtgtatgctccgctttcatgttcgctgatatcctgtgcgaaaacaccgatttcatccttttcaaaaacatcttttgccatcatcagatacagagacggaggagcgatccatacttcgcagttcgtagtatttttgtttttatagcttagtaactgaaccattaattgttgggcatcaattacatttttgttcattttccagtttcctgcaactatttttcttctcatagttttttttattttaaagttaaaaactaaaagtcagaaacgaatttctaacttctaatgactcaattatcgattaatattccaaagatttttcaaaagcgtataaaaagtatgctcttcatccgtcactttattatccgccttgatcagcgttttcgcaaactgaatgaaacttgttctttcttcctccgtagaatcgtcgtaaaagcaacgcgcgtgaaattcaaaatgatctttccattcttccggctgtagcagggcaatggtttcaagctcattatcaagattcattttaaaaggaaattcatcggctaaatactgctgaacaagcattccttcttccggagcaaattctccgtctacagaagaaagaatcatcaataaatgataaccggcaatgggtttgttagacttttgcattgatatagtttaaattttagtgtttttttatttcagataatcttttgcaggctgtttgtcaacaacttttccgttttccagaaccagtacaaaaggattgcttcttgcgatcgttttaattgcagtggcatccatcatcaaatttttaatagttttaaaagtattcggaagcgttgaaactccgtaaacagcagttgtacccctagtttttattttagcttcaagctgtctgatcatttccggagaaacattttgcggatagtacgtgaaaattaaaatggctttcggagcattgataatctgctgagtaagatctgttcctgtggtatcttcgagcttgaattttgcaatttcagatttgtagccttcttttaccagaacagattcattttttccttcttctattttccagggcgatccttctgcccaatattctgtttttttgatataatcatcctgatttactttcagaacttctccggtttcagcatttttcagggaataaaacgttttatactgggacggatttttagtaattttagctttttcagctctcagatcggttccgattttataatcacggaaatcgataacaggttcatgaataattccataagcacccaccacaatcatcgcaacagaaaaaacgcccagaagaatatatttgaatttatttcctgtttctttttttgtgctgaagctgtatgcatcttttttcttaaattcttttctgtaaagaatgaaaacagcaattaacccgattaaaaggacaatatctttaataaaactctgccaaggcgtaaatttaatggcatccccgaaacatccgcaatctgttaccacattgtaataggcagaataaaaggtaaggaaaccaaagaaaatacaaagtgcaattaatgcagaaagcgtgaatttaagtttcagtttgatcaaaagcataaagcccagaagaagttccagaaccacgacaaatatggaaagcggtaacgcaaacttttcaaaaaacggcatattaaaaacattcggggcaaagtattcttccattttgaaagaaaaaccaaccagatcaaccgcttttacaaaccctgaaaggatgaaaataatcgcaagtaggaatcgtaataaaccttttatcataattaatttgtttttttattctacattggttgctttttcagaaaatttgatcaggcagaacaccgcataattcagcatatcaaaataattggcgtccaatccttcggaaacaatagtaacgccttggttgtcttcaatttgcttggttctcaaaactttctggtaaataagatctgttatagaggaaattctcatatctctccaggcttctccgtaatcatggttttttctttccattaattgctgtgcttcggtcgcataatgattgtaaagctttaaaatctcttctttattttcattaaaatcgttggaaaaacctttttcaagctgaatcagtccgatgatggagtagttcacaatggcgatgaattcatcctcttcactttcgtccaccatttttttgtcagtcatttgtaatgtgcggattctgttgactttaatataaatctgatccgtgattgagcttggtcttaagaccctccaagctgcaccgtaatcctgtaattttttgctgaataattcgcggcactgactgataactttcccgaactgtactgatgtttctgacataaattctcttaatcttccaaatatacgaatttttgtgtgttggaggggttcggaataggagagtttgggcgtttttgggtgagagcgtttatgagtttgagggagagcgtttatgcatggtgtggttaatgggcatttaaatgatattttcagatttgtgcgtttcttttttatgctatttttgtagaataaactcaattcgtaattccaaaatgtttactcataaaccatccggcttcccagctctgtcattctccaacactcaaacctttgaatactttcactccatcaactgcaatggaagattgatagatttatcagccccgaaaatcatgggaattctcaatctcactcctgattctttttcagacggcggaaaatttaacaatgaaaaatctgcgctggaacagaccgaaaaaatgctgaaagaaggtgctgaaatcatcgacatcggaccgcaatccacaagaccgaatgccgaatttctgacttctgaagaggaaatccgaagaatcggaaatatcatttctctaattaaaaaagaatttccggaagctttgatctctttggatacattttattccggaaccgtaaaatttggttttaatgagggcattgatctgattaacgacatttccggcggtcagtatgatgataaaatttttgaaactgttgcagaaacaaagctgccgtacattttgatgcacgtaaatcctacctatgagacgatgcacgataagttacgatttgaagatattattctttcagaaaatcgatatttttcagaaaaaacggcagaattgctaaagttaggagtaaaagatctgatccttgatcccggtttcggatttggtaaaacagtggaagatcaaatgaaaatgattgacgaagtacagtatttaggattcggaaaattccctttactgataggtatttccagaaaatctttcatttataaacctttaggaaaatctcctttggacattaatgaagaaactcaaaaactccatctgaaagttttgcagcagggcgcaaaaattttgagagttcatgatgttatggaagccaagaaaactctggatatatttttgaggagctaaaatgatccgaatcttcggattttcatgattaaaaaacaaaaaagctgtctcaaaagtcagttttttggcttttgagacagcttttttatagttctaaatttatctttccagtgtaaaattagaaatcaccttcggacgttcggtttcattggctgctttccatgaagttcggtacatccattccgtcattttatacagctttttgtaattaatgttttccgattcatcctgcggcgtgtgatactgatcgtgcagaacactcgtgaaaaatattgcaggaattcctgcttttgcatagggtaaatgatcgcttctgaaataaaaatattctgcatgcttcggcgaatcccaatctttcagatacctgaattttgtactctcattattggcatcttcagccattttcaccaattcttcagaatttttgtgaggcggatttcctcccagaagcgcagcttcattattatcatttctcccgatcatatcaccattgagaacggcaacaatattttcttttggcactacaggatgcgctgcatgccatctcgaacccagcaaacctctttcttcagcaccatgaaaaacaaagagaatactgcgttttgaaggctgttttttataggctcttgccattgccaacattgcaacacaggtacttgcgttatcatctgcgccgttatagattgtatcgttttttacaggatgtcttattccgtcgtgatcctgatgtccgctgattaaaacaaattcgtttttaagtttagaatctgtaccgtctatttttccgatgatgtttacggaaggatatttatacgtttctgtgatgaggtgcagcgaaattttaggattgttttttacccagtcagaattttctcttttaatccataaaaccggaatattattcgttacactttctcttaaaccttctactccgtaagaacctctggtcatttgcggtaaaacttcaacccagcttttatccgatgtttcgtctgtaatgaagatgattccttttgctcccagttcagatgctttgttatagtattttgttcttacaaaaccgggatatcttcttacgaaaagcgtcatttccttttcaatattcttgtcagatgcatttacggcgagaattttccctttaatatttaattttgttaaatcttcgggttcggcatttccggcataaagaatttcagaatcgatgtctgcatttacgggttccgcaataagaaaatctttccataattttaaggaattgtcaccaattttcagagtgctctgcggaattacctgatgtctgtacatatcaaaaaactgaaagaaagttccgttatctccggctggtttcattcccgcttccttggctctgtcagcaagccacattgatactttaagctcatctaaagttcctgcttcacgccccagaaactgatcggctgcaagatcatacatatctttgcgaagatcgccttctttgatagcagaaaccagaggtttttgataggattgagcagtaaaaatcccaaaaacaaacacactgattgcagataataggtaatttttcatcttgaattttttaatgattggattgcacttttaaaatttaacacaaaataaacaaaaaatgaagtttaagttaacgtgaactcgacgctaaaatattgaattatatttagttgtccttggcatctatgcatttatccagttcgggaaatttaccgatggtttttccgggtaaaaacaataggcgcatatggcagannnnnnnnnnnnnnnnnnnnnnnnnnnnnnnnnnnnnnnnnnnnnnnnnnnnnnnnnnnnnnnnnnnnnnnnnnnnnnnnnnnnnnnnnnnnnnnnnnnnagtttattcctttgggcttggtgatcgggtttgcaggacttattttatttcttaacggaagtgtaagttcttctggttcgcatacacaaacagcagatgcttcaatcagggtaattgcatttgttgttctgggcttaagttccgtagcgtgggttttaggatctctttattccaaaaaaaatccggccggtcagtcaacttttatgaatattgcccaacagcttattactgccggtatcgcgtcatttattattgcgtttttcagaaatgaatggactgatttttcaatcgtaaaagtaccgttaaacgcctggttaggattgtttttccttattgtattcggatcgattatcgcttatctttcgtatatctggcttttgtctgtaaaacctgccgctttggtaagcacgcatacttacatcaatcctattgttactgtaattgcgggttggatcgttgcaaatcagaccattaacatcaaccaattttacggattgattgttattcttgccggagttcttttaacgaatgtgactaaatattttaagctttccaagcggtctaaagtgaaaataagaagagtgataaggcacgtgaacaaaaccgcaagaccttatcagccagtataaaatttaagtaaaaaatgatagagataaagaatgtttcaaaaacatttcatcagaaaagacagtcgtttaaagcgctgaatgatgtaagtctgacgattgaacagggcgatattgtaggaatcatcggattttcgggagcgggaaaaagtaccttaatccgaacggtgaatcttcttgaaaaacctgacagcggtgaaattgtgattaacggaaaggattttacgaaattaaattcgagacaattggcacaggaaaggaaaaagatcgggatgatttttcagcattttaatctgctttcttcgagaactgtttttgaaaatattgcgcttccgttagagctggatcatgtcagcaaaactgaaattaataaaaaagtaaatgaattgctgaaaatcgtaggactggaagataaagctcatgattatcctaaaagtctttcgggaggacaaaaacagagggttgccattgcaggggctttagcaaatgatccttatctcctgctctgtgatgaagcgacgagtgcgctcgatcctgctaccacacaatcgattttgcaattgttgagggatattaatcagagacttggaattacgattttgctgattacgcacgaaatggaagtcatcaaaacggtctgcaaccatgttgcggtaatcgacaaaggtcaactattaattaaaggaactttaagcgagattgtctcgaacaaagagaatcctatcatcaaacaatttttaaactctagtgttatgacaataccacaggaactgaataaaaaactacagcaagagcccaagccggcttatttccattggtggaagtagaacttaatgaaaatatatcggtggaagaactgctttccattgtttacgataaatataaaattccatacaaactgctgaaagcggatgttgaatatttgggcgattccaattttggaaaactattgcttcagcttcagggtgaagaggagaaaaatcagcaggccatttattatttcaatcagaataaaattcaaaatacggtaagaggatatgcttagtgatacagtgatttctcttttatcaaagggaatttgggagacggtttttatgacgtttgtttcggggtttttcggatttgttctgggtttgcctgtcggaattctattgtttttaacacggaaaggacagcttttggaaaatgtaatttataacaggattttatctgttctggtgaatattttccgttctattccttttattattttaattgtatggatgattcctttcacgagaagtctggtaggaacatcaatcggggtaaacgcagctttggttcctttaagcatcggagcagctccttttattgcaagactggtagaaaacagcttgctggaagttcctcatggattaattgaaactgcaagagctttaggagcaagtccgtttcagatcatcagaaaaatactgttgccggaagcacttccttccttaattaataatgcaacaattaccttaattacacttgtcggctattctgcgatgggaggtgctgtcggagcgggaggattgggacagatcggatatcagtacggctacattggttatgatgccgtgattatgaatcttgtgttgggattgctggttgcgattgtttttatcattcagttttcgggagaccgattagcgaagaggtttgatcatcgttgagttttttgagttggagtttttgagtgggagtgtgtgagagtgagtgtgtgagtgtgtgtgagagagagagtgtgtgtgagagtattttgacaatcaattgataagtgtgaatgtgaaatagtgtggtggtttgaaaatttcagccatcaatcgggcgaaagatcagcaaaaagtagtaaaagccatattttatttattaaagaatttaaaaatctaacctttttgttttcgcccttttttaaaagaaaataatttacaatgaaaaaaataaagattttaagtttattagcagcgggtttgttagcatttaccggctgtaattcatcaaaaaaagaggatccgaactttataaaagtgggaatcacttccggaccggaacaggaaattgccgaagtggcgaaaaaagtagcgaaggaaaaatacaaccttgaagtagagctggtttcctttaacgattatgtggttcccaatgaggctctgaataatggcgatattgatgccaatgcttttcagcacgttccttatttaaccgaacaatccaaacagagaggatataaattagcggttgttgggaatacttttgtctaccctatcgttgcgtattcaaagaaaattaaaagtattaatgaacttcagaacggaagtaccatcgttattccgaatgatcctaccaatggcggacgttccttacttcttttacagaaaaacggtttgctgaaactgaaagacggcatcggacttttaccgaaagtaacggatattgttgccaatcctaaacagttaaaaatccttgaaattgaagcgccgcaactgccgagagtgttggatgataaagaagtggtaattgccattatcaacaataattttgcggctcaggcgggattggatgccgataaacagggaattttcaaagaagacaaagattctccttatgtaaatgtaattgtttcaagagaagataacaagacgtccgaaaaggtgaaaaatttcgtaaaagcttatgagtctgacgaagtagtgaagaaggcagaagaaattttcaaaggcggtgctgtaaaaggctggaactgatttggtgaatggttaatagtgaattctttgataatgccgcagaattcatcattgacaattcaccattgacattttgaaaaagtctattattatatattcagacattgtttcagttttttgaaatgatgtcttttttattttcaaatcacgggttattaaaaattatttatttaaaatatattttctcaatttgagataataaaattttttgctatttttgtttccaatcaaaaaaggctttttatgtttaagaaaaccgccattgtaagtttattcacatttatttctgcttcttatatggctcaaaatacaccgcttcctgtttatttagacgaatccaaacctgtggaattacgggtaaaagatgccctttccagaatgactctggaagaaaaagtggcgatgcttcatgcccagtcaaaattcagttcaccgggtgttccgagattgggaattccggaattctggacgacggacggacctcacggagttcgccctgaagtgatgtgggacgaatggaatcaggcaggctggacaaacgactctattatcgcctaccctgctttaacggcactttccgcgacatggaataaaaaaatgtcatggaattacggtaaagcactgggtgaagaagcccgttaccgaaaaaaagatattcttctgggaccgggagttaatatttacagaactccactcaacggaagaaatttcgaatatatgggtgaagatccttatctgacttcaaaaatggtggttccttacatcaaaggcgttcaatccaacggtgtggcaacttctgtgaagcatttcgccctgaacaatcaggaaatgttccgtcatacaagcaatgtaaaagtggacgacagagctttatacgaaatttatcttccggctttcaaagcggctgtaacagaaggcgattcttggacgatcatgggagcttatgatatgtacaaaggtcagtatgcaagccagaaccaatatcttctgaatgatattttaaaaggtgaatggaaatataaaggggtcgtggtttccgactggggtgctgttaacaataccgaacaggctatccacaacggactggatcttgaattcggaagctggacaaacggactttcggcggggacaaaaaatgcctacgacaattattatctggcaaagccttatttagatttaattaaatccggaaaagttggaaccaaagaactggatgataaggtttcaaggcttttaaatcttgcgtataaaacaacaatgaaccgaaacaaacctttcggaaatatcgcttctgaagagcataaagctattgcaaaagaaatcggggaagaaggaattgtattgttgaaaaatcagggaaatatccttccgattgatctgaataaagctaaaaagattgctgtaatcggcgaaaatgctatcaaaatcatgaccgttggcggtggttcttcttcattaaaagtgaaatacgaaacgcttcctttagacggaattaaggcgagattcgggaaacagtcggatgttcagtttgcgagaggttatgtgggagacatcggtggagaatacaacggtgtaaaatccggacaggatttaaaagacagccgttctgaagccgaattattaaacgaagctgtggaactggctaaaaaatctgattacgttattttcgtcggaggattaaacaaagcagattttcaggacagtgaagggaacgacagaaaaagttacggattaccttacaatcaggacaatgtaattgctgcgttggcaaaggcgaataaaaaccttgcggttgttctggtttccggaaatgcggtggcaatgccgtggattaaagaagttccgactgtagttcaggcttggtatttgggttctgaggcaggaaattctatagcttcggttttagcaggtgatgcaaacccttcaggaaaactgccttttactttccctgtgaaactggaagacaattctgcgcatcaattgggagaatatcccggaaataaagcggaattggcagcagataaaggaaaagatcagaaaaacccgatcaatattagctacaacgaaggaatttttgtaggctacagatggcatgatacgaaaaaaatcaagcctttattcagtttcggacatggtttaagctacaccacttttgagtttggaaaagccaaagccgataaaacaacgatgtctcaggatgataaaatcacgtttacggtttctataaaaaatacagggaaaagagccggagcggaagttgcccaactgtatatttccgacctgaaatcgtctgttgaaagaccggctaaagaattaaaaggttttgaaaaagtgtatctgaatccaggagaagaaaaagaagtaaagtttaccattgatcaatctgctttaagtttcttcgatccccaaaaagacgactgggttgcagaaccgggggattttgaagcacagattggtaattcttccgatgccataaaaacgaaggtgaagtttacgttaaagtaatcttacttatatatttctaaaacggagagtcctttcttaagggctcttttttattgaaaacacaaaaagtaataaatgtaataaaaacggtttttaaatacaaaatatatggttataaaatcaaaaatccattttaacccttacattgtatttaaaatattccgaactttgctcaagtcgtctcgcaaaagcggggcgattttttttgtctatatattaacaaaataaaaaagcaaaatgaataatttaattaaaaatctaaaaccaaacccatatctaattactattcttttcattatattaacagctttaatagcgtattctgtatcaataaaaaaagaagttcaagttaaattttacaacgatttttttatattcaaagctaatgattaagtattagcagagaatctttttttataaatttatttatcattagattgtcattccgaaggaatctaaactcgaatctttccattagaatttttgatattttttggattagattccttcggacaatcttataaatttttacaaatgtttaaaaactttaattccgattaaaacgaaatccttttgtatattggtaaactcaatataaattactcgcgagaaattgctctaaataaaaattttaactgattaaaaaactataaattataatattatcatattttaattaaacctccacaatcagctccctctcaaatccattatacttttccgaaatataaccatgcggattgcagataatctccgtctcccctattttgtatcttttcggcgtgtgaatatgcccgtgaatccaatacagcggttgatattccaagataaaatcctccaaattggaaacgtatgcggaagttaacggatcatttttaaaatgttccgggctcgactgtaaacttggggcatgatgcgtcactacaatatttttcatgccctttgaattttcaagactttcttttaaccacaatctcgaaaactgatgaattttataaatatcaatcgacctcatcttggaataagaaggatctcttttaattttcttataatcgttcattccttgctgacagacgaatccgtaatatctcggatctccgaaaacagaaaaatccgtccacaacgttgcgccatgaaaacgaatcccgtcgatgtctgcaaaaccgtcttccatcacaaaaacattggaattttctgcggcagcttttattttatttaacgttttaggataagaacctttataatattcatgatttcccaacacataaatcacaggtttatcgggaatttttgttttgatccattcaattcctttcgttcccaaattaacatctcccgccaaaacaatgacatcggcatgatcaaaagatagttccgacattccaaattcctgatgcagatcgctgatgatttgtattttcatggtgctaaaaagatgacatatattaaaatttacaaaaactttattaactaactttgaaatacttataaagttaaatgctttacttttcaagtttctttactccagttaaccaagttttaagctcttccaagatcttactatctcttatttcttgttcctcaatcatttcctttcctaactttttcacaaaaatatttttcaccaaccatcctttttctttgttaaaatttccttcaagatattttcgccccgccccacgagttctgcaagcattgattacaatatcaatattttcatattcttttaataaattattaattttttttacttgatttatatcgtctcccgcgctgacgaaagctatatacaaattatcaacttcgaagacagtacatatatcacctttcttaagatcaaattctttattgaggtaattattagaaatccattcagctattagcttaacttttgttgtttttcctgttttacttactcctcttaaagtgaacatttttttcatttattatcttttataagctaatataaaaataaacttattgttaatctaattatgaacaaaagaatcgacaaaatttgccgattctttcaatatataatttagtttaaagtaggtcagtttacgaaaaagcgatttcagattccgctatttttatatttctaaagatgaaaaaacacaacattgttaatgcaaaaacagcatagccgatcagaataatcaggctcaaatttcccactgccagttctgaaggaaaaacctgactcatcaacgtcataaaagacaacccgattcctgcgcctaaaaaatagcttgtagaactgagactcgaagccactccgtaagaggaaggatttacatcctgaatccccaaaacagacaaagcggtaaaacaaaacgtcatccctattcccgaaatgcatgctgcacctaataaaaccattgacaagggatgcccgaaataaatagagaccaataatgccaaagctccacttaacatgaaaatccagcccaaaattcccatctgtgaagaatttaaccttttagaaacatgaggaagaataaattttgccaccaaagcagacataatactgaaaggaaccaacatcagtcccgccgaagccgcactgtgattcatatctttctgtaacatcagtgatattaaaaacaaaaatccgatgaaaaatgctcctaaagccacaaaagccagattagaaactaccagtgatgaatgtttcaacaattttaaatcaatcaaaggttgggaaaccgattttaaacagaaaacgacagaagccagtaaaataaccgccaaaattaacgaacctgcaaccaataaagtctgttctttgatgtgaaccagttcatgcgttccgtatgtcaagctcagtaaacctaaaaccaataaaattcccgacagaagatctgttttttgggacacccctttctcatctttcggaagatactgatacgcgaaaatcaacgtgatgaaaagaatcggaacattgattaagaaaacccaatgccaactcagatacgtactgatgattccccccaaagaaagtccgcttccggaaccaatcgcagcaaaagaactgaaaatcccgatcgcacggtttctttcctgatcttctttaaaagtattcgtcacaatcgacattgccgaaggcataatgaaagccgctcccaatccctgtaaagccctaaaaatagctaaagttccaaaactttcagacaaacccgctcccagagaagtcagcataaaaaggaataatcccaaaagaaatatgttctttcttccgagctgatcggagagttttcccccgataatcagaaagcctccaaaaaataatacatataaagtctgaagccattgtacagtttctgcaccaatcctgaattgctgttgaatagaaggaattgtgagattgataatggcaatatccaaagcctctacaaatgttcctaccgatgctaaaatcaaaatcaaattctttctctccatatagttcaattatgctgcaaaattaaaattaatagaacgtatataaaaattcaaactaaaattaagaacatatttaatataattcaatttaaaaaagaacaaatagtcttatatttgaaattaattcttcaaaaacagaacagatggcaacagaaaattatacacccgacgaaaaagacctttccattctcagaattttacagaaggatgcgaaattaagcgtccgtgatattgcagcaagaattaatctgagtcccactcccactcacgaaagaattaaacgaatggaaaaactgggaatcattaaagaatacaccaccgttgttgaccgtaaaaaagtgaataaaggaatgatggtgatctgtatgatcgcactgaatgtccacaacaaaaaaacggcaggaaaatttattgaggaagtcggaaaactgaaagaagtgattgagttctacaacatcagcggagattttgattttatgctgaaaattcttgctccgaatatggatgaatttcatgaatttttcgtgaacaaactctctgaaattgaaggaatcggacagacaaaaagtatttttgtgatgaacagtattaaggaaagttctcagattttgtaattgaaattaaaaaactacaatcctttctccatctcttttttgctgcaatcctcacaaattccgcttaccagaaagttatactggttgatgataaaattctccggaagccgaatttcaggaacgacattctctatgcaggtaaccgatttgcatttctcgcagttaaaatgcagatgattgtgatgatgtatctcggaacagcctctgcatttcgcaaaatttaccacaccatccacatttacaattctgtggacactgccctcttcttccagtctttccaacactctgtaaatcgtaacgcgattgcacaaatcgcccagtttcagttgaatatctgcatgtgacaacgcatgatcagattctgttatcagcttcagaatctcggtttttgcctgtgtacttcttgtctgtttcatataattaatgcaacaaagttgcgataataaattttaattcctacttttgcaacaaagttacaataagaataatgaaaacaaaaatcttagatcttatcggtatttctgcggcggttctctgcctgatccactgcattattttccctttgctgatggttgttccgctgggtatttcccataatccctatattgatttggcatttctgctcgccggaattatcgtggtttcaaaaataaccagaaatatccgctcaaccgctctgaaattgcttttctgggcttctgttgcactcatcgcaatttcaatcagtctggattttattttccatattcattccgaactgatttatgcaggtgcaaccggacttattactgcacacctcatcaatttcaaaaatcataaacattaaaaaatcattcagatatcatgcaaaaaagaattcctgtaacggttttaagcggctttttgggtgccggaaaaaccacacttcttaatcacgttcttcacaataaagaaaacctgaaggttgcagtgattgtaaatgacatgagcgaagtaaacattgacgcacagttgataaaaaacgaaaacacaatatccagaaccgaagaaaaacttgtggaaatgagcaacggatgcatttgctgcactcttcgtgacgaccttcttattgaagtagaacgtctcgcaaaagaaaaccgtttcgattatctgctgattgaaggaaccggaattgcggaacctgttccgattgcccagactttctcttatgtggacgaagaaagcggtatcgatctttcccgattcagctatattgatacaatggtaacggttgtagactgtcttcatttcttcaaagatttcggttccagcgaattattgactgacaggaatcttactgatattgagggcgataacagaaccattgtaaaccttcttacagatcaggtagaatttgccaacatcattgttcttaacaaaacagatctcgtaacggaagaaacagtgaactttctgaaagctgccattaaaaaactaaatccggatgcaaaatttattacctccgaattcggaaaaattaatcctcaggaaattctcaatacaggactttttgacttcgaaaccgctcaaaattctgcaggatggcagaaagaacttcaaaatgaacatcatacaccggaaacggaagaatatggattgagctcttttgttttcagaaacaaaaaaccatttcatccggaacgcttctggaattatcttggtcaaaagtatccggaaggtgttatgcgtgcaaaagggctcttctggctggcttccagaccgaacgatgcgcttaatttttctcaggcaggaggctctttccgaatggagaaggcaggagtatggtggtgcagtatgccgatgagtcagcgggaaatgtatcagtctttctccgaaaacagagattttatcgaaaataaatgggacaaagactggggagaccggatgaacgaaatggtcttcattggtcaggatttaaacagagaacagatgataaaggatctggaaagatgtcttctgaaagacaatgagaagtatatgtttgatcagaatatatcatttgaagatccttttcctaaaaatatttaattatgaaaaactcatcaaaccagcctttcgatgccatcattattggcggaagttactccggattatctgcagcaatggctttaggaaggtctttaagaaaagttctgattctggacagcggaaatccctgcaatgcacagacacctttttcgcataatttcattacacaggacggaaaaaagcctgctgaaatttccaaaacagcccttgaacaggttctgaaatacgaaacggtaaccttccttcagcaaaaagcaacagaagcgaaaaaaacagacttttggtttgaaataaaaacagaaacggaaatattttcatccaaaaaaatcattcttgctacaggaattcgggatctttttccggatataaaaggatttaaagaatgttggggtatctctgtaattcattgcccttactgtcacggctacgaattcaggaaccagaaaacggcaattatggcaaacggtgaaaaaggatttcaccttgcagggctggtaagaaatctttcgcaggatctgatgttactgacgaacggaaaggctgatttcccggaagagcaaatgtttgatttaaagaaaaacaatatttctattgtggaagaaaaagtaacggaaatcgttcatcgggaagggaatctttctgaaattatttttgcggacggaacttctcttccgatgaacgtactctatgcacctccggcttttgaacagcactcggatattgctacacaactgaactgcgaatatacggagacaggacatattaaaaccgattcttttcagaaaacaagtgttgacggtgtttttgcgtgtggagacaattcttcgcccatgcgctcgatagctcactccgtttatacaggaagtgtttcgggaagtattctgaatcttcagcttgtacaggaaaatttttaaaaacgaaaagaaacatctactataaatttatctgaactttatttaaacaaaaatttaacgattcctttttatcaaacaggttaacgttaaattcatataaatcagaaaaataagctttaaattaacatcaaaataccagcaataacagacggaaattcctgagcggttctgctctcttaacaggggcattctcattgaatccattcgatttattcggaaaaaattctgaagaaaaactcagcttcaaaggaaaaaaagcaaagaatattatcttcatgatcagcgacggaatgagcaacggaacactttccatggcaaatctctattccaaaaatattttgggacgagaaagcaactggatgaatctttatctggaaaacagagtttcgagagctttgatggatactgcttctgcaagttctatcgttaccgattctgctgcagcaagttcttctttcgggggcggattccgtgtaaacaatggttctctgaatgtaggcgtgaacggagaacaatatcttccgatctggcaaaaatttaaaaagaaaggtaaaaaagcgggatgcgtaaccactgtaaccattacccatgccactcccgccggattttgcatcaattctgccaaaagaagcgcggagcctgaaatcgccgagatgtatgcagaactgggttttgatgtaatgatgggaggtggtgatgagtttttcaatgctgaaaaaagaaaagataaaaaagatgtctattcttcctataaaaataaaggctaccaaatcctgaaaacccgatcggatcttcaaaatacggataagaacaaacctattctgggtgtttttaccactggtgctcttccctattccatcgaccgaaaaaatatgcctgagctacaaaaaactactccgactcttgctgaaatggctaaaacagccatcgatcatctgaaagatcataaggagggttttgttttacagatagaaggcggaaaggtagactggtcggctcacgccaatgatgtggctgcacttattcatgatcagattgcgtttgatgatgccataaaaacagtcatggattttgcagaaaaagacggaaacactctggttatcataacgacagaccacggaaatgccaatccgggaaccatttacggagcagatgccacaaaaaatttcgacagcattgccaattatcagtttacaaatgaatatctgctgaatactattcgtcccgattttaatctgcagcaggtgaaagactggatatttacgaacaaccgtttttcagtgtccgatgaagaagcgaatcatctgcttaatttttacaaaggtctggaaaaagacgaggaaggattgtacaattataaaaaactgccatataaagcatattccgagattcagaaaaaacacaacagcgtaggatggatcagcatggatcacagtggggattatgtggaactggcaatgtacgggcccggaagcgaattgctgaaaccttttgtaaagaatacagatctgcattatctgatgctgaaagctgccgaagtggagaataaattttaggcggttgaaatatcaataatctaaatattttactgtgcatcaatatcattatttatattttaatgttatattcgatggctatctttattttacataaaatcacagaataagtacttgctaaaaattaataatacatttctttccgaaattatctaatacgttctttaagctggcttttaggttttcaaaagaaatatatgcttcaaatttcagccacttatattttacaaatctccataagatttcaattttattgagttctggtgaataaggcggaataaaataaatcagcaaatccaattctttccactctttgattttttctttgaattttttgctcgtatgtaaagaagaattgtctaaaacaaccactgtttttttgactattgtctgcgcaaatctgtcaaaaaaaacaatcagcatttctgagttgatggtcttgtcaaaaaaatcataaaccaaatctcccaaagtattcatcaaaccaaaaacactggtgcttttcctccggattgaaggtaataaaacaggatcatctttgctttgccatgcatagggaacattgggaactaatccgaaatgacttgcatcaccataatacatatcaatgtattgatcagcattgagttttgataattcctctatttccttttgggcttttgaaaaagtaagcttacagcgttttttcttcaaggatttcctacatcttttccatttatagccgctactattttaaaaaatttctcaaggtaggctttgttatttttatttcatgctctctttccaaaatattcaaaatcacatttaaattacggctgttttcctttaccaaatcaggtaaaatatctttgacgggatctaatttcaatttagcacctcttcctgtttttatgcttaatgttttctgtttttcggataagttttctgcttgttcccatgcattaaaaaataaggtcacacgcaatcttcctacctgcataattctggaaatctccatcattgactttttttgtgcagaaagcctcaaaaacatacaccgttctctgaccactgagctatctgaatttttatatagattttcaaccaatatactctcttcttctgttaattctataaatcgcatacttcaattattaacaagagaaatataaaagtttttacaaaaatgtattattatttatttttagatacttattatttagaacctttaataaatttaattatagaagctgcccgatcgggcagctttttatattttcatctcaaaaaaatattaattataccacaaaagtgttattgtaaaaattataattctctcgtaattttatactaaacttttaaaaatatacaccatgaaaacaaaattttatgtatcagcattgttgctgatattatttggcattatagtatccggacaggaaacaaaggaaaaatgggtagaagaaagaactaatgaggttataaaagaaaataataaaattgtttctgatgaaaccttcagagaacttgccttcaaagattttgcaaatatacagaccggtgataaaaataaaaacgcaccaggaagatatgctgcactaaatgttaattcaaaagataaaagttttgctttttctccattcatgcagagattgggtaacctatttttttcagcagatattacgggcacattgtctaatgaaggagaatatttcgactggaaaaacagaaataccatagtagtcggattaaatgctacatggcttctatctcctattaaaaatttcaaaacaaaaccttcagaggatgattataaagctatgtatggaggtatttatgacaaagtggaaggtgaaattactaataaagattcagcaaaaactaaacttaaacttgacgatattaccctcaatactaaagtatattataatgagaaagactcattagcaaaatatgtacagaaatacgaaacattattggcagaaaaattatggaccggtaaaacactgttctgggtgaaatttaatgtaaatcctatcgcacaagacaatttttattatacgattaaaggggatactgccagtttaaaaaatccttataaagagacaattaatctattctctgtacagacctctttcaatgcgtatcgggaaacaaaaaatgttttactatatggaaatttatacctgaagggaacaagaaaacataatctttcagaaatcaatcagacttcacaatggaacaagataagatcccttacaaacgaaacctatatctcggaaagcgcaaaaaatgtttatgagcttgacaataataaattttacaatctatttttattcgattacggtttacagggaattattatctacaaaaaatttaatatcggattggaactaaaatatgactatgtaaaattcatcaaacccaatacaaccaatgatgtaagtaatattgataatttctcagccggtattgtactgccatttaaagataaaacaggatctccttctataaatatcatccctttttatcaatacagacagtatataggatatgaaaaaacttcagaaaatattgtaggtgttaagttcagtttgccatttggcaattaattttaagtgtataaaactgtcttacaaactactaaacttctataatataaagaatattacagtttgtgagacagttattttattaaaattttcctaaacaatatcggttggcatttatttattaaatctattcctaaaatttatattctaaaataatccaattacaattccctcattgcgaatgcttaataaattaattaagtttacagcgatgaaaaaaaaccactaccggagattggcattgatgggaatattgctgatcattttatttgccttccagaaatatacaagtaaggaaaaggaagaatttcccgatgttcagtttattacacaaccttccgtttctctcagctttactgagtttgatcccaatgaactggatgaaaagcaatggcagaatttaggtttcacagaaaaacaaacggcgacgattctcaactataagaaagtagtcggaggaaaatttgtatcaaaggaacaactaagaaaatgctttgctatttctgaggaaaaattttctgagctgaaccactatattttacttccggaaaccagtaaagaagcaaaatcagatgcattcaaaagttttgaaaaaaaatcaataacggttagaggaaaatttaatcccgatctttattctgcacacgactggatagatatgggctttagtgaaaagcaggcagaagctattttaaaatacaaaagttatctgggtggaagttttgtgagcaaggaaaaattcagagagtgctttatcatcagtgaagagaattttcagaaaatcgatccttatcttattctgccggagaaaacgccggaaaattacagagctgctaaaaattttaatgccgataaaaagaaagttcaatatcattctttcgatccgaatgcattggatattgaaggctggaagtcttttggcttctccgataaacaggcacagatcatcatcaattaccgtgaccgaaatttaaaagggagctttaaaagtctggaagacattcagaagtgttttgtaatttcttctgagaaatttgaagaaatgaaaccgttcattaaattcaatgcagaaacaattgcagtgagcaaaaatgacaaatctgaaactaagcagcaggaaaaaacggatttcaccaaggtagatttaaacgcaataacctacaaacagcttatggagtttggatttgacggaaaagcagccggttcgatgatcggttttcgaaataaacttggtggatttgtgaataaagaacagattctttccacgtacaatattgatccggaactgacgaaaaaattacttttaaccgcaccccttacaacttcgaatgttcagaaatatacgttgcaggatgctccggaagaatggctaaaaaatcatccttattttaaatattctgcggagaaaattattttttaccgaatctccgaaaaagatgaaaagaaaatctggaagatgctgaaactgaaaccagaatacgaattgaggatgaaatggtatttgaagtaggatactgctttttacacttttattgaactgtaaaagaagcagaacattaaaatattgtatttaaaattaacaagatacctctttttaattaacctcagttcgggataagaaaaaaaattaaataattgacttatcgcattatattaatttatcgcaaagaaaaacaaaagatttttttacttattgaaagttggtaagctaaacaaaggcacttcgtttatttaaaaaatacaaaaatggtattactttgataagttttacgcctttgtatatcttaaaagctgaattcctgataattgaatctctttgtttaaccttgcggttaagaagacttatcccgaactcagttaattaatttaaatttatcaattaaatctgcgcaatctgtaaaatctgcgagagatgaaacaaaactttttgagattttttgcacttcgttcgcgtcccttcattctctgtcagaatgacaaaaatgctgtataaacatatgggaaatattaaaaaaagagacgcgcaatccggcatctctattatttttaatcgtatgttttactggaaccttcaaccagtttttgtaaagcagaaagttcttccttcgtaagatctctccatttcccgatcggaagatcgagcttgatatttaaaaccctgatccgtttcagtttctttacttcgtagcctaaatattcgcacattcttcggatctgtcggttcagtccctgcgtaagaacgatacggaaattcatttcatcaattttttctacctcgcattttttagtgacggtatctaaaatcggaactccgtttcgcattttatccagaaatttgggcgtaattggtttatcaactcttacaatatattcttttccgtggttgtttcgggatcttagaattttatttactatatcgccatcgctggttaaaagaatcaatccttcgcttggtttatcgagtcttccgatcggaaaaattcttttgggatgattaatataatcgatgatattatttttctcacgttttgtatcagtggtacaaacgattcctacaggtttattaaaagcaatataaacatggttttcttccggttcacgaatcggttttccgtctacttcaatcatgtcttcatcgtaaacctttgttcccatttccggaactttaccattaatggtgattcttccttcctccaaaagtttgtctgctgctcttctcgagcagtatcctacttctgataaatatttgttaattcttgttttttccatactattttcagactgcattcatcaataaaagcaatttctttttatgactcgttaaatctaaaatcattttccaaaaagtctgacgttgcatcttctattttgtattctccgatttttgtccttctcaattgcgttaaatacgctcccacacccaactcctgtccgatatcatgagctaaactgcgaatgtaagtccctttcgagcaacccaccgtgaaacttacgagaggaagatcaatctttacattatcaatataaaaaattgtggttttacgggatttcatttccacctcctctcctgctcttgcaagatcatatgctctttttccctcaatttttattgccgaaaaaacgggcggagtctgatcgatttctccgacaaatttttccaatgccgtttttatctgctcttctgtaatttccgaaatatcctgatgcagaatttctggtttttcagtatcgtatgattctgtctgtacaccgatttttatttcggtccagtattcttttggggcatcctgaatttcaggaatttttttggtgaatttaccacagcagacaatcaataatcccgttgcacgcggatctaaggttcctgcgtgaccaattttgaatttcttaggtaaatcaaactctcttttgagtttgtatttcattttattgaccgcctgaaaagaagtccagtccaatggtttgtctaataaaaatatatgtcctgattgtagatcttcagcagtcatgaatatgagtaattggtaatgagtaatttttagtattactgtttatattttttagcttaaattatttaaagaaataaaaataaatcagcaaggcaattcctacgaaaatacgataccaaccccaaggtctgaaaccatatttattcaaaactccgatgaatgctttgatggcgattaatgcaacgataaatgcaacaacatttcctacgatgaaaatcatgatgtgatcctgagattccataatcatttcataacctttctgcggattaggcgtttctttcccccatgttttcacgaaaacggaatacacggttaccgccaacatggtaggaaccgccaaaaagaatgaaaattctgccgctgcttttctggtcaatccctgtgtcattcctccgatgatggaagctgcactcctactcgtacccggcatcattgcaagacactgccaaaaaccaatcgttaccgctttttttatggtaatgcctttttcgtcatcaatctttggatttttaaaccacgtatcggcaaacagtaaaacaacacctccaagcaccagaactgaagaaatagcgatctgatttcctaaaaccgcttcaattttatcatcaaataaataccctaaaaccaaagccggaaccactgcaaaagccagtttaaaataaaactgcaaatttttcagatcaaaaaactttttccagtatgccacaaccacagaaaggattgccccaaactgtatggaaacctgaaacatttttaaaaattcggtttcttcaagtcccagcaaatttgctgtgaaacccatatgtgcagttgacgaaatgggcagatactctgttaagccttcaatgatcgcaataataattgctttgattaaatccataatttatccaaaattaaaagattaagaaaccaagagatttagactgatctaaatttccgaatttcttaatcttcaaataaaatttatttctactttctttttaaaatcgcgtatacttcgattccgaaaccaatcaccacaaataatggcgcaatcctgattcttcggatagaaaaaataccttcattccatgagttcggatcgtattttccgtctacggtattggcatcggctcccatcatcagaagaaatcctacgacaataaatgccaaaccgataagcatccatttgaaattttcttttccgaaataaaaagtgttttcctttggtgcttcggttgtttctttcccgaagttatctgcggaaaatttatttgtttttttgctcatttttaagagtaatataagtcgtcaacgtttgatcttaagaatctccaggtagctacaatcgtacttaaaaccgtaataaaaatccctactccgaataccagcagaaccagccagaagtattggttgttgtcctgtacaaaggcagatccgatctggcttgtaaagtaataccatgctccgaaaagaaccagaagtccgattgcagaaccaattgcccctaaaactaccgcttcgatgatgaaaggtttcaggatgaatcttctcttcgctcctacaagctgcattgttttaataataaatctcttggagaatattttcagacggatggaattgttaattaatacaaccgccagaattaaaaacagaatggaaaatcctaagatccatttcagaattctgctcaggttgttgtacacatctaccattaaagtactgtcgttctttacatcgataattcccggaacggctttaatgactttaatggcttcatcgatctttgccggatctacatactccggttttagggcaatttctacagatgaagggaaaatattttcttcgaagagcgcatccgtatcaattcccattgcttttttagcttccttggaagccatttctctggtaatatacgttgctttctttaccggagccagtgtctgaatttctttgaaaacctcagcctccattttcgcaatctttacagaatcttttgcctcatagttttcatcaaagtaagcatttaccacaagttgctccttgatatagtcggaatatttctgggcattgattaaaataagtcccattaatcccaacaaaaataacactaaggcaatacttattactactgtaatattgctagacctaagccttttcttattaaattcatctacagatttagccattaatattaaaatttttggctaaaatagaaaaaatcttccgaaatttgggaacgaaaaagagaaaatcactgttaataaaatcataaaaaacattgagtgtaaaagcaaaaaagcatcttggtcagcactttctgacggatgaaaacatcgcaagaaaaatagtagaaggtctgagttttgagggctacaataaggtaatggaagtgggtcccggaatgggagttcttaccaaatatctgctggaaaaagaacagcagatttacctcgcagaaatcgataaagaatccatagaatatttaaaggaaaactattctaaagtaaccgaagaaacttttgtgggagattttctgaagcaggactttcagtttaccaacggagagcagattgccatcatcggaaattttccttacaacatatcttcccagatcttgttccagattattgatcattatgagctcattccggaaatggtgggaatgtttcagaaagaagtagcggaaagaacagccgccgttccaagaacaaaagattacggaattctctctgtactgattcaggcttattatgatacttcgtatttatttaccgttcatgaaaatgtcttcaatccgccgcccaaagtaaaatccggtgttatcagaatcaccagaaatcctaaagaaggtttggcaggaaatgaggtattgtttaaacaaatcgtaaaggcaggatttaaccaaagaagaaaaaagctgtcgaacgctctgaaaattttaaacatccctgaagctttgaaaacccatgaatttatggataaaagagcagaagaactcagcgtggcagatttcatctcatttacacagctttggaaagaaagtgtttagtaaaaattaaaagatctgcaatttagcttttctaaaaaaaacaaagcccctcaatttcttgaagggctttcattttgcattatcgattgattttttattctctgtttttcaacataatccagccagactggctcatgcttgtttttgatttcggatactggaagttaaatttataccagtacgttgcagttggcagctttttgcctcctaaagttccgttccagattgggttttctttcgagaatctgaataattctgaaccatatctgtcatacacagaacctgtgaagttattaaagtttccaagagcagtaagatccagtgtatcattaacaccatcctgatttggagtaatcatatttgcaatattcagtgtgaagaattctaaagctcctacacaatgtgttcctacagttcttacctgaatgtcgtagtgggtattgttggaaagtcctgtaaatacattagactgctgccatgaaataccaccgtccacagaatattccgctgtctgaggaatattattgatcataggaacctgcgcagtaatggttaacgtattgttgctgtaatcaatattagaaataaacggagaagctgctgccatcacttttgcagtgaaagtttcctgacaaaatccgttcttaatggttacagaataaatacccaactggtctacttctattgttctggtcaccgcacctgtactccacagataagtgtaattcggtcctgctcctgcgtctaaagttactctgtctccctgacacatttccacatccattaatgtcgaagtgatttccggaactacctcaacggtgatttttgcaggctgtaaagatttacatccttttgttcccaatgcgtatacagagaacgttgttgtattgtatactgttgcactttgggtattacctgttcctgagaagtttgcccactgataagttactccgccggttgccgtaagatctaccacagttcccggacatactttaattttggatgccactacacttgcaacaggagtcgcttcttttgataaagttaattttaccattttactacagaaacctccattcgatacgacaacataaagaatttgtccatcattaccattgtagtgaagaatatcctgaatgtaattattgttctgggcaattgcatctgcctgatttacataaaaatagaatactgcacccggcgttgtactgattgacgccattgaattggtaagatcaaaccaggtgacatccggagtcgtacagagcagtaatgtcgcatctactgcggctggtgttgttcctccgtttattttgatattggctttacccggacaaggacttccagggaatgaaacctgaatttcgtaattccccggctgtgttgctgttatcgtaggagaggtagctcccggaattgcaactccgttgaagaaccactgatatgtcatattcggatcactaaccgatgcagtaattacttgaggaacattgtcgcacacattaatttgctccggtaatgttgctccggaaggatctaataattctactccaatattgaaagatccaccatctaaaaatacagcagaatcatagctgctgtcaatagcatctgccaaaaccattttaaagtggtacgcctgtccaggaaccactgtagcggtcgcttgtaaaggaacagttcttccgttaaagttagtttctatgttagccgtattgtaccctccaaaaaaggcaacgtttggcgcaccgcaccccatattggttcccgcaaaactgttttgcgggtgaatattggttacactcacaggtcctgttcccggagccggtaatacagccatgttaacatatggtccgccggatacaggttttaataataaagcaaatgcatctgagaagctacaagggaaagttcctgtatattcttcggaagcaaaaaggtaattaaatttcacctgactagaagtaggcacgaaatcaaactccagaataacggcatcattaagtgttgcagaaggattcgttgccgcaacaagatccggatcactacccgttggcaaatcatctcctaaagtagagctaatatagctgttcccggctttttgagcataccctgtagaaagaacaataccatccttgaaaggaaaactggttgtccctctgttaaaatatccccaggatctgtttgcattcgttgccggaagattcgggctcacctgcacgttggaaacgttgggtgtaacacaggaattggttcctgatgaaatcaacacatcttttaccagctgcaaaggggtataagctgatgcaggatatgtaggagtattcacatcaataaaagcacccgctttcattgtaagagaggaagccttttcttgctgaggctttctgtttgtatttttttgtgaataaaagagactcgatgaggagaccgcgaataaagaaaacaatagtagatatctcttcataatatttttgttttaacaaatttaatttttttttgaatataccacacatatatttggcattattatgctaaaaaagcaaaaaaaccttccgagtggaaggttttcaatttaattatcttttaatttctgttttttagtaaaatccatccgcttcttagctcgagttttttacttgcaggattttcccattgcactctataccaataagtagcagttggcaacactaaacttccccgcagcattccgttccagaaagtctgattcttggatgctttaaatacttcctgtccgtatctgtcgaaaatagaggcggcaaaattgttatatgtgctgattcctgtaaaatctacaatatcatttttaccatcggaattcggagttatggcattgataactatgaatgtaaagaacgatattgaagtgctgcattttgcatcttttactcttacgagaagattataatttgcattatccagtatattgtagaaaacatttgaagtctgccaagtgaaaccgttatcagctgaatattccagagttccgcctgtaggatttgtagtagacagcgtcaaaatatgattttcataagagatatttgtaaactgaggcaatgtaggattgataagctgtgcagaaaataccttagaacaaaccccattacttatcgttaccgtataagttcccggtgtacttacggagatcgtttgcgttgttgctcctgtattccatacatacgtataatttgttcctgaacctgcatctaaaattcctgaatctcccgcacaaacattaacatctttcagagcagaaacaattgcaggaacaacctgaatggtaattgaagtaggattagcgaccttacatccgtttccacctaaagcaaaaacagaataggtagtcgtggatgttggagatacaatctgtgtacttccgttgcccggtaaacctacccattcgtaagtaactccgccggttgctgttaaagttacagattcacctgcacatattttcatttgggaagcagttaaaaccgctacaggaggagcaaccgttattgtaatggtagcaggagtcgctgaaacacatccattagcacccacagcaaaaacggtgtaagtagttgtagaagtaggcgaaactacctgtgtatttccatttccagtaagacctgtccaattgtaggttgcacctccggaagccgttaaagtaacagattctcctgaacatatctgtaatgctgtagaagttacagtcgctgtcggagcggttgtattttgtgttaccgtaacgtttgaagtatacgtacagtttacatttccgggctggttgatattggttaccgttaaagtatatactccacccgcgtttaccaccggagttaatgtattggctccagaaacaatatttccaccgccggttgcggtccatgtaatggtagatcctgcaggaattacagaagatgaagcattcaatgtaatctgaggagtggtacaggtaatctgctgaggcggattaatggttaaagttgtttgaggagtagacaaaagctgtaatgtgaccacatttttacatcctccgtttgttactaaaacatatatcgtctgtcctcccgcactgttgaaagatgcaggattggcaatggtatttgtatttccggcattggcatccgcagcattcagataataggcaaaagtaactcccggtgctgttgtgatctgaggctgtgcctctgttaaattataattaattcctccgttctgataacattttaataaagtagcattctgtacggtaataggctgagtcacctgtatcgtaaccgttgctggagtagcagaaacgcatccgttcgctcccaccgcagttactgtatacgtcgtcgtcgttgcaggagaaacagtttgtgttgctccatttcccggaagtcctacccaattgtaagtagccccgccggaagccgttaaagttaccgattctcctgaacagattaaaacttttgaagccgttaatcctgtagttggcggcgcgctgtctcccgtaacggttacattcgctgttgctgtacaggtaagatttcccggctgataaacattagatatggttaaagtataagttcccgctgtatttaccaccggatttaaagtattcgcgcctgaaacaatatttccgtttgttgttgtccagctgaaggtagaacctgtaggatatactgaagctgaagcatttaaagtaacctgtgaatttgtacatgttaaaactcccggtgtagcaatagttgccgtaatctgaggcgcttttatcagttgtaattcagcaactttggaacaaaatccgtttttaactgaaacatacaccgtctgtcccggacttgaaaaggcggtcggattcgcaatcgtatttccgtttcctgcaaccgcatctgcctgattcacataataagcaaatgtagctcccggtgttgtactgattgaaggttgtgccgacgttaagttgaaagtagcattaccctgtgtgtaacaggatgtgagtgttgcattctgaaccgtgggcgaagttcccccgacaatagtaatggaagctgttcccggacaggtgtttccgggtaaaaatacctgaactgaatatactcccggctgagttgccgtgtaagaagcattggttgctcccggaatagggtttgttcccaaataccattgataagtagctccacctccctgaactgacgcagtgaatgtctgcggagtattatcacagacgttgatggaggaaggaagtgtaactcccgccggatctaataactgcacaccaatatcgaaagatcctgcttcaagaaataccgcagaatcgaaattggcatcctgataatctgccaaaaccatcttgaaatgataagtctgccccggaattactgtcgctgttgccgttaaaggaacagtacgcccgttaaaattcgtttcgatctgaggaatattataccctccaaaataggctacattggctgctccgcaagccaatggagcacccgtctgatattgtgtggaagggtgaatattggtaacgcttacaggacctgctcctcccggtaaaacggcaagattggtataaggatccccaacttttcttaataaaagtgcaaaaccatcactgatggtacatgggaagtttgtctgatattcttttgaagcgaataaatatctgaaagtaactttcgtagaagccggaacaaaatcgaattctatataagtcgcatcattaagctgattgttaggaactccaagagccgccgccaaatctgcatctccacctgaacctaaaccgtcacttaaagttccctgaagatcatttccagcttttctcgcatatcctgttgtaagaacaattcctttggcaaaagggaaattggtggttgctttattaaaatatccccagcttctgttttggtctgtcactgctaaattaggagaaacagacacattcgttacattcgcggcagaacatgcagatcctccactaatgaggacatcttttaccaattgtgtgatactgtatgaagattccggataagcggctgtatttacatctataaaagctccggctttcatgttttcaggggtttgtctgctcacaactccttttccgtctctgcctttctgtgcattaacgaaactccctacaaaaaccaaaagcaaagccaaaaataaattttttgtcctcctatttaacattttatattattttaaacaaaaatactatttttttcaattgaatttcaattcggtactaattacattatcacttatataattaaatatcctgtaaaaaaagtaatttcaattatctctgaaacgaaaaaaagaccaacaaattgttggtcttttctattgtgattaaattattcaaaatttttcaataaaatccatcctgtttttacgacaggctttttacttgcaggatcttcaaaacttacctgataccagtaggatgaggtgtttagtcgtttaccctgaaaatatccgtcccaataaggctgtaagctgctttctctgtaaacctctcttccgtaacggtcgaaaatagaggctttaaagtctttgtttttattcacgattcggaaatcaatgatatcattaatgttatctccgtttggcgtaataacgttctgcatcacgaatgtaaaatattcaaggaagcctacacagcttgtattcttcactcttactctaatggcaataactgtatttctcggtacattggtaaatgtatttgaattttgccatgttaaaccattatcaacagaatattccaaaacaccattgcttggattacttgccgtaataatcatggttccgttttcgttatagttaacattaataacttccggaataaccgcctgaataacctgtgttgtaaagacctttgaacacactccattggtaatggttacactgtatgttcccggagttcctacagaaatcgtctgagatgttgctccattactccacagatatgtatagttcggacctgctcctgcgtctaaattaataacatctccctgacagatcatgcctccggaaagtgttgatttaatagccggaacaacttctacagtaacggatgcaggctgtagagatttacatccctgtgttccgatggcataaacagaatatgttgtagtctgagttggagaaaccgtttgtgtagctccggttcccgataaattagtccattgataggttgctccattggaagctgttaaggttgtagattcgcctaagcagattcttacttttgttgccgtaagctgtgcaacaggcgttgcttcttttcttaaagttaaagttaccgttttgctgcagaaagctccgttggaaacaacaacatacaaaacctgtccgtctgttccgttataacttgccatttgcgccgccgtaagatagtttgcattctgagcaacagcatctgcctgattcacataataacgaacaatagccgtagtggaagttgtaatctgcggcgttgcatcatttaaattaaatgttgccaaagatggtgttgtacaaagttttaaagtagcattctgtgcaggtggcgttgttccgcctacaatggtaacggtagctgtctggcagttggttccgcctacaaatgttcttaccacatacacaccgggtgatgtagcgatataggtcgcattggttgcccctgcaattgcaacaccgtctttgtaccattggaaagtcattcccggaacagcagcaatctgtgcagtaagagtttgcggcgtattatcacacatattcaccgtcgttaaaggatttccgctgccgtctacaatgatcattccgatatcaaaagatcctccctgaagaaaaacggcagaatcaaaaccactgtcggaagcatctgccaaaaccattttaaaatgataggtctgccccggaattaccgttgcggttgccgttaaaggaattgttcttccattgaaattcgtttcgatatttgaagtgttcattcctccgaagtaagcttcgttaataggtccgcatgagaacccgttaccggaaggaacaatgttggtaacgcttaccggtcccgctgttccgggtaaaattgccatattggtataagtgggatcccctacttttttcagtaataaagcaaaaccatcggaataaactccacaagggaaatctgaggtatattcttctgaagcaaaaatataattgaattttacctgagtattgttgggaacgaagtcgaattcaataaaaacggcatcttttaacggagccagaggattaattgccgtaacaagatcaggatcactaacggtggatccgggaacagtgtcacctaatcctgtttccaaaacatttcctgctcttcgggcttttccagttaccaatacaacaccatccgtaaacggaaaagcggtagttcctttatgaaaatatccccaagctctttcggtgtctgttgcgggctgattgggagaaacagtgacgttggtaacattggcaacagcacaacttgaaccgcctgtaataagaatatttttaacaagctgttctatattataagatgatggcgcataggaagcgacattaacatctataaatgcacctgactttaaactcgaattagtatgcttttctttgattggttttcttgatgctttttgggcaaaaacggaacccgaaaccagaagcaacactaaaaggaaatagtagttttttaatctataatttaacattttgttgttgtttgttcaaaaatactaaattattacttaaaatcagaacaaaaaacaagcgttatactacaaataacctaaaatattttaaaattatagaaataacagatattctatctgaattaataaaaaagactgataaaattatcagtcttttgtgaggaattttactatttcaacaattttatctgttgattaactaatcttttttcagttcgtcaatcatattttgcaattctgagatcttatctttcagtgctttaatttcatttttgttggaacttacattgcttttcagcattacatttttggcgcgctcattatggtcttcttcatcttcgtcctcattaatttcttcaatatcttcctgaatatcctcaatatcttcattaatttcttcgatatcctcgctgatttcctcaatgtcttcgctgatctcttcaatatcttcctgaatatcttcaatatcttcactgatctcctcgatatcttcctgaatgtcttcaatcttttcatgacttttattcaccgacatctgaatgaaaatggcaagataaattgcctctaaagaaaccactgtggtaagaatcagcagcattttatcaaattctacaatatgaagaaccggcagaagaaaagaaatcaaaaaaaacagggtatgtgcaatgagcgacggaatagaaccgatccaccatgtaattccgttggcaattttttccagcatttcaattttttcttcgttctttttcattgcgtttcaatttttatagtaattctttcgtaactcccagtccaaacaatgcaaaatcgtattttgcaggatctttttcatcaaatgtacggatgataagatctaattcttccaccgttttccagtcgttctgcgttctcgtaatcaaaccgagtttccttgaaatatttccggtatgtacatccaaaggaatcgacagatgtttcggatctgtattttcccaaagaccaaaatctacgccacgcctgtcgttacgcaccatccagcgcagaaacataatgattcttttggtggaagaatttttatacggcgaacttacgtgtttgtgcgttctgtgcttttccgctcccagaaactgtgttctgaaacgttcaatcgcatgagaaaaattaatctcagaatcatttaccctaaatagatcctccagactttcattttccgtgtaaattctgttaaactgcttaataaaataagcaaaatcttctccgttaaaagttctgtgaacacttttgccctccatcaatttcaaatccttttccgaatgattcaaaacaaaatcataaggtgaatttcccataatatcgagcattttttctgccgatttaatgatcgcctttctgtttccccaggaaattgtcgccgccagaaatcctgcaatttcaatatcctgcttcagagaaaaacgatgcggaatctggatcggatcattttctataaattcaggatcattgtactggtctgccttttcatctaagaagattttcagttcttcaaacttcaacattatttttaaatttttacaggttccagtgccttcggtaagaaagtattgggaaaaacagttcttgcttcatcggtaaatacggtaagatctccgtacctattggaaaaatgtcctaagatcagctttccgacttctgcttttctggctaccgttgcagcttccagagcagttgtatgccctgtataatctgccatttccttcaaatcgtgaagaaatgtagattcatgataaagcacagttacatttttaataattgggatcacactttccagatatcttgtatcgctgcaaaaagcgtaagatacagaaggagcaggttctatcgtaagaatttcatttttaagcacatatccatcacttaaaacaaaatcttttccggcttttatattgtgataatcacaggtttctatttcgctgtatttcgcgatttccttcatgttcagatgcctgtctttcggtttttctttaaacagataaccgttgcagtatattctgtgatccagaggaatggtgtacacttctaccctgttgtcttcgtaaattttctctgaataatctttatccagttcatgataaatcacttcaaaaccacggtgtgtttctgtaatcgtgaaaatagtttccagcattttcttaattcctttcggaccgtaaacgtgaagcggcgtttctcttcccaaaagtctgaaggaagcaataagccccggtaaaccaaaacaatggtctccgtgaagatgagaaataaatatatgattgatcttcgaaaatttcgctttggcttttctcaactgtacctgcgttccttccccgcaatcgatgaggaaagaccgttcttccatctccagaaactgcgcggtaggagaagaattcaccgtaggaattgctgaattaaagcctaatatcgttaaataagtactcaaatcgatggtttattaaggtgacaaatgtacggatttaggttaagactaagatttaggctgagattaaaattacatattgaaaccaattaaaatatctaaattcacctgagttcgggataagtcttcttaaccgcaaggttaaacaaagagattaattatcagattttaagatatacaaaggcgtaaaacttataaaagtaatactattttttgtcttttttatataaacgaagtgcctttgtttagcctaccaactttcaataagtagaaaaatcttttgtttttctttgcgataaatcaatacaatattgtaaatcaattatttaaattcacttcttatcacgaactcaggttaaattccggtttctgttttcaccatacctcttaacctcaacttcagcctcaaactattctttccctttcaggaaatccaaaaatagatccaaagactgttttctgtggctgattttgtttttatcctgcggttccatctctgcaaaagtcagttcgtacccttccggaacgaagatcggatcgtagccgaaccctttgaaacctttattttccttcaataaatttccgtgaacccttccgtcgaaatatttggctccgttttcgtcatagtagcataaaacagtaatgaaatacgcttttctgttttcaacaccttccatttcgcccaaaactttttcgatatttttggcaaaatcatgatttcctgcataacgcgcggaaaaaattcccggtcttccgtccagagattctacaaccagtccgctgtcgtcacccaaacttggaatccctgttttttcgaagcagtattttgccttaattaacgcattggcattgaaagaatctccatcttctacgatttcttcatgaagatcgtaatcagcaagacttttaacgacaaattcatctcctaaaatctgctgaatttcttctttcttatgtatgttgtgcgttgctaccagtaattccatattcaatttcatttatttaatttttattttgtttaaaccttaaatcatcatcacaaataataccaatgatattagtgaaattagtgtgtaaaaatttagtgccattcgtgtttagatttaaatttcagaataatgcactttgtattttttcataaaaagaaaataaaacaaggagaaaagtacaaatcctatcgtcagtatgatccattctgaaactttgaaagcatctgcgaagctttccgtttttacataagtgattaataaggtggaacataaattattaaaaccatgcaaaagcatcggtaaaagcagagattttgttttgtaatagaccaatcccagaacgcatcctaacagaacagctcccacaaactgccacggatttccgtgaatcactccgaagattacggaagcaaaaacaattgccattcttggttcaacgcctttattcatcaatcctttctggataattcccctgaaaataatttcttcaaaaataggcgcacagataacagcagtaatgatcatcacaaccggatcatcggtaagtttttccatcatctgcgtgaaaaaatcgtaatactttccgaaaaaaggtcctgttgtaggaatctgggcggtaataaattctgcaataaacatcatcccgatcatcattggaaaaatcaggagataggtagaaaaattagtgggagaaaaattgaaattcagcttcattcctgttgttcttctcacgataaaaaaatcaaaaaaagcaatagccgtaagaaatcctgcggcattggtaatcataaaaaaccagtctctgtactgtagattttctttgaaagtaaacatccagaaaacattaaaaaacgaaactaccattgttccgaaaaacaatcctgccagtaaaacaagaccgccaatccatgtaaacttgaaattcggatatttacttttttccatagaatctaagaatttattgagaaacaaagataattcaaattatgagaaaagagaattgcagagaagtttaaccttaaaatacattgttacatttatgttctttaaaatgtttaaactaatttcaaaattaactgcaaaagttgcaaaagaccattattctacaataattagaataatcaaagtgctcaaaagaataaaaatcgaagatttttaaagctgttgttgcctttttcatttttcgttatttaatttgaataaaatttcagcttatcttttataacttttgcggttaaataaaaaaggttaaacagattttaagttaaatttctctttcatactgttttaatgaagtaactttgcagcttaatattttcacatgcagggtttggtaaaaaagtcggagaatgttaatctgtctttaatcagttatgtaagttttacctttatagggtatttcgttatcggattatcgctttcggtacttcctattttcattaataaaagtcttgggttcagtctggtaattgcaggtttggtcatcagtctgcaatatgtttctacatttttcctgagagcttattccggaaaaatcattgacggaaaaggtccgaaaccagccgttttattcagcatgatctgtttttcgctgacgggaattttcctgatcattgcttattattttaaattttctccgtggttaagcttaacatttttggtcatcacgcgtcttcttacaggctgcgcggaaggaatgatcggtgcaagtccgattaactgggcaattatggcagtcggagaaaaacatacggcaaaaattatttcctacaacggcgttgcctgttacggcgctttagcaatcggagcttctctgggcgtaacgattgagcatgaattcagcttatacggaatcggaattctttcgattattcttggaattttagggtttctttttgcaaaaacgaaagacaataaaaccaatacaaatataaaggaatcgcagtctttctggaaagttttgggaaaagtggctcctttcggcgtttgtctggctttaggaggacttggttttgcgagtatttctacttttatcactttatattacaactattttcactggaataacggcgctttatgtctgagtgttttcggggtactgtttgttgcaggaagactcgttttcaataatgtaatcaataattacggaggaattaaagtcgccattatctgtcttttggtagaaactatcgggcttttaattatttcgtttgccacgaattcacaaatggctcttttaggagccggcgttacagggcttgggttttcattaatttttccggctttgggtgttgtggcgattaaaagcgtgccttcatccaatcagggttccgctttggcgggatatggtctttttattgatctttctctgggtgttgcaggaccgctgattggcggaattgctgatctttacgggatgagttatattttccctttcagtgcggcgatggtttttgtgggattgggactggcttatttacttaagcttaaacacaaatagcaataaatttttacaagaattaacaggacttaggttggttttcgcaaagacgcaggatttttattagtctcaaatctttaaggcgcaaggattttatctttgataaaattgatcatcagaattataaaataaaatctttgattttatcctttcatcttaagactggaaaattcttatttaaatcttgcgccttagcgtttttccaataaaatttaaactcatcgttgatcttttaaacacgaataacaccaatggttttcacaaattccacgaatttgattttttttaacctatttttagtttggcaaaagcaaacaaaaaaagttgtttaaagtaaaacggtagaaaactctatggagttttatctgtgtagacaccatattcacaatgcattttgcgttccgtaggaacgctatcttaaaaaaatttatcatatttatagatatcaatcctacggattgatttgcggatttattcttatttctacacagattctgctcctaaaggagcaaactctcttacttcaaacaacttcaaaataaaaaatcaaagatttttgaactaatgtgtcctgttacgtataaagaatttaatcttaagttgatcctgtttaaactttttttgattgtccgtttattaacctaaagcttcgacaggctcagcttgacatctctagaaatcaagcgtttagtattagaggtgtcacactgagcttgtcgaagtacctgttgtaaataattgattttcatatcagtgcatagtaatagattgtttaacggatattcaaaaactttttatttaaccgcaaaaggtacaaaagatgactagacttttattttaaagttgattattataaatgaaaaagttcgcaatagtttttaaaaatctttgattttttattcttttgattgctttgattattctggaaattcgctttaacattgtcttttgtgccttttgtggttaattttgaaattagttcaaacaaatttgttacgaatgtgttataatcttttgtgactttgtggttaaataaaattcatgtcttttcatgtaaaaatttgtgttcaaacaaaattttcaggattcgacaaaattcccgatttttgcaacttcaaaatacgatatgtcagacttaatcaaagaaatagaaaaaagaaaaaccttcggaattatctctcacccggatgccggaaaaaccactcttacggaaaagcttttgcttttcgggggtgcaattcaggaagcgggtgcggtaaaatccaacaaaataaaaaagggagcgacctccgatttcatggaaattgaaagacagagagggatttccgtggcaacttcggtattggcttttgaatacagaaaccacaagatcaacattctggatactcccggtcacaaggattttgcagaggacacgtacagaactttaacggcggttgattctgtaatcgttgtgattgacgttgcaaaaggggttgaggaacagacggaaaagcttgttcaggtttgtagaatgagaaatattccgatgctggttttcattaataagcttgaccgtgaaggtaaggatgctttcgatttgctggatgaggtggaacagaagttaggattaacagtttgtccgctttctttgccaatcgggatgggagctgactttcagggaatttacaatatctgggaaaacaatatccagttgtttttggaagagaagaaacagaaggtgggtgaagcgataaagtttgacaatattaatgatccttcaattgatgaagtgattggcgaaaaagctgccgctactttaagagaggaactggatctggttcagtcggtttatccggaattcaaccgtgaagattatatgaagggggatttgcagcctgttttctttggttcggctttgaataatttcggggttcgtgagttgctggatgcttttattgatattgcaccgatgccacaaccgaaggaaagtgatacacgtattgtaaagcctgaagaaaatggttttacaggattcgttttcaagatccacgcgaacatggatccgaaacacagagacagactagctttcgtaaaaattgtttcgggaactttcaagagaaatgaaaattatcttttggtaagagagggcaaaaaaatgaagttctcttcaccaaatgctttcttcgcggataaaaaagaggtggtagatgaaagtttcccgggagatattgtaggtcttcatgatacgggaagtttcagaatcggagatacgttaacaggcggcgaaaaactgaatttcaaaggaattccgagcttctctcctgaacatttcagatatattaacaacaacgatccgttgaaagcaaaacaactggcaaaagggatcgatcagttgatggatgaaggggttgcacagttatttacccttgaaatgaacggcagaaagatcatcggaacagtgggtgcgcttcagtatgaggtaatccaatatcgtctggagcatgaatatggggcaaaatgtacttacgaacctctttccatgcataaagcatgttgggtggaagcggatgaaaagtcagacgaattcaaggaatttgcgagattaaaacagagatttttggcgagagataaatacaaccagttggtttttcttgccgattcttctttcacgattcacatgacgcaggagaagttcccgaatgtgaaactgcatttcatcagtgagtttaagaatgcttaattgaaataaatcaactttaaatagattatccgcggaagtttttctgcggatttttttgtttcattaaaaatattaattgattttaagacactatttggtaaactttagaaacttcttatatttgagtgctttagacaatttattaaacaaaccatgaaaaacttttatcaaattcttggagttcccatcgatgctacaaatgaagaaattagaactgcttacaggaaacttgcaactaaattccaccctgataagaattttggcgataaatattttgaagatcgctttaaagaaatccaacttgcttatgatactttaagcaatcagtatcttcgtagtgaatataatcaaaaactatttgatttttttcaaagagcaacttcaactaataaagagcaatcttattcatctgcaacacaaaatccacaaacatcaaaagctaaaaacccaaaagagaataaaaaaataaaaaaaagtattcttatcaacataaaggaatttttctcatctaaatcaaatatcttctggattataattttagttttaccaattgtagcatactttgtaaattcttggttgggggttatttcaattttaggaatatatttttgtattttaatatttttaggcacacttggtgataaacaaaagtctttaggtggttgcttaattggatttattggagctcctattttggttatctatattattgtgcaaacatttaatttcttttttgaagataaatccgcagtaacagatttggctaatacaaaatcagttgattccacaacagcagagattgattctattgcaacagtaattccaacagattattctaatttagattccatagcttcagttgtggataatcaaaaaccaatcacatataaatctttagaaaatggaaattctccattaacaaaatgttttggaagcggattgtttggtggtcaagcttatatagttttcaaaaatagcaatgaaactgatgcgattgtttgcttagtaaattattcaacaagaaaaacagtaagaaacgaatatataaaagcaggaacagactataaaatgagaaaaataccaacaggaacatattttttaaaagtttattatggcaatgattggagttcagaaaaaataaacttttgtggttcaaaaggaggatttaattttgatgaaagtttttctaagtcagatggaataggagatttaattaagattgaaaatacaagcacgagttatacaactggaacaatcactttatacaaagtttcaaatggaaatatgaattccgaacaaataaatgaatcagaatttttcagataaaaattttagtttctaagttagttttcaaaccaccagataaaatcaatctttttaaaactcttgagaaggttgattttttattttagtatcactactattaaaaaaactttgtaaaacagtatttttttattttacaaaatactaaaattcaactccttatcaatttacataagcaaaacaattcgtttacaatctttacaaaaacttccctcctaattttacctcatcgaaaaaattaatgttatgaaaaagttcatcttactcgttgctgtatcaagcacgtttatcatgtgtaaaaaaggagaagcggcaacatctaaaattgaagacgcagtgcaatcagcagacagtacgatttctgcgacctctgaaaaaattaatgacgtaagcgaaaaagccaatgctgcactggattctgccaacgtaaaaatcaaggattttgaaaacgctaaaaatgaagtgaaagacaagattgaaaatacttccaaaatggtagattctttatctgagaaaatttcttccgtaaaactggaatcgaaaaccgagaaaaaagattcggctaaaaaagaagaaaaaattgtggtgaatgttccggctccgaaagtgattaaagaaaccaaaatcgtttataaagacaaaccaaaaagtgaaaattacgaactgaatgttctgaaaaataaaatggtaaaatcaggctatttaaccatgaatgcagacaatgcggaaacggtaagggaagttataagacaggaaacggttagaaacaacggtgctgtgacaaaagaagagctcacttatgttgcagcagaaccttccaatgacagatcttcggaaatagcggatcaaaaagcatattatcttcagattaaagttcctctgcagaattttgaccaattgatggatgatttaagcagcaatatcggcaatattgaaagtaaaaacatagaagtaaaaggaaatgattatgataacaatacgctttgtgagatcaggatctctcttttggataacgctcataaaactcctgaaacttttggtgaaaaatctttagccgccgtttcttcaggatggaatgtcattacttccatattcctgtttattctgccgctttggccattgtttttaattgccggaatcggatattatttttataaaaagaggggtaaaaacacaaccaatcatgatgcccattaatttcgaaagtccatcctttgtgatggatttttattttaatattattttaatgggataaattgatttttaaccgctgttattgatatttttgataagtcattaagaaaggaaaaaagcttgtaaaatttaactttagcctcaaatttccatcaaaaagataaataaagcagacaaaaaattttatatattatattttgtggttcgtgtgaatgtaaaaaggcttccaaattcggaagccttttactatttcatgtataattaagcaattactttgcaatgcttcttgaaataacgatcttctggatttcagaagttccttcgtagatctgagtgattttggcatctctcatcattctttctacgtgatattctttcacatatccgtatccaccgtggatctgtacagcttcaatggtagtatccattgccacctgagaagcgtataattttgccattgctccgctttcagagatatcttttcctgcatctttttctacagccgccttgaagcaaagcattcttgccgctgtgatctgagttgccatatctgccagtttaaacgcaatcgcctgatgattgatgatttctgttttaaacgcttttcttgttttggcatattttaaagccagttcgtacgctccggaagcaattcctaaagcctgagaagcaatcccgattctaccaccgttcagaacagccatcgcgaaattgaatccgaaaccgtcttccccgattctgttttccttcggtacttttacgttattgaagatcaaagaatgcgtatcgcttcctctgattcccagtttatcttctttcggaccgatctcgaaaccttcccaacctctttctacgatgaaagcgttgattcctttatgttttttctcaggatctgtctgtgcaattacaatatagtaagatgctgttccaccgtttgtgatccagtttttgatcccgtttaaaagataataatctcctttatcttccgcagttgttttctgggaagttgcatcagaacctgcttcaggctcagacaaagcaaaagctccgattacctgtccgcttgccaaaggggtaagatattttactttctgctcttcagaagcaaatttctcaagacctgcacaaaccaatgagttgtttacagacattaccacagccgcagaagcatctatttttgcaatttcttccattgcaagaacgtaagaaacgctgtccattccggcaccgccgtatttaggatccaccatcatccccataagtcccatttcccccattttctttacctgttctgcaggaaacttctggtcgcggtctctttcgattacttccggtaaaagctcgctttgcgcaaaatctcttgctgcctgctgaatcatcagctgttcttctgataaattaaagtccataacattgaataattagatggtcgctaatttacactttttgggcaaatctgaaaatagaatcataaattagataaaaacaacgaaagaagttgatttttaaatattcatcatatatatattaagtttgaattattaaatatattatggcatacattttattaatttctaaataatcacttccaatttccacaattaaaaaaaatgcttatatttaaaatcctttaacaattacttaaaaaatcatgacaatcaaaagattatttgatattcctcaatatgcactgaaaacgtatccgaaatcggatatgtttgtaaccaaatatcatggtgaatggaagaaaacttccacgcaagagtttatcaatgaagccaataagatatcaagaggacttttaaaacttgggataaaacccggtgacaaaattgcattaatcaccactaattcacgaacagaatgggcaattatggatctcggactttcgcagatcggagtggtttctgttcccgtttatccgagtatttctcccgaagattatgaatttatctttaccaacgcagaaattaagtactgttttgtgtctgataaggatcttctgaacaaagtggtaaaggtaaaacacaatattccttcgttacagggcgtttttactttcgacaatattacaggtgctgctaactggaaagaaatactggatcttggcgaagatgattctacgcagattgaagtggaagatctttcaaatgccattaattcggaagatctggcaacgattatttacacttcgggaacaacaggaaaacctaaaggagtaatgctgactcatcataatatcgtttccaacgtgttgggttcgatcccgagaattcctaaaaagaaaagtctggattataaagatacaagggttctgagtttccttccgatatgccatatttttgaaagaatgcttttctatcttttccagtacaacggtttttcgatttatttcgcggaaagcatcgaaaagatgggagaaaacgtaaaagaagtaaaacctcattacatgagcgtggtaccgagacttgtggaaaaagtgtatgataaaatctacgccacaggttcttcagcgggaggactgaaacagaaaatctttttctgggcactggatctgatttctaaaaagaaaagtgtttcaaaaccatccggattaaaggaaattattgccgataaactggtgtttaaaaagtggagagaaggtttaggcggtgaaatcattactttggtttccggttctgcagctttgtctacaagactgaatttaatgttccagaatgcaggaattcctattctggaaggatatggattaacggaaacttcacctgtaatttcggtaaattctttcagcaaaatgaaaatcggaaccgtaggtttacctcttgataatctgagtgttaaaattcaggcagacggagaaattacggtaaaaggtccttctatttttaaaggctattttaaaaatgaagaaatgaccaaagaagtttttacagaagacggctatttcagaacgggagatatcggacatatcgacagtgacggatttttacagatcaccgaccgtaaaaaggagatgttcaagacttcgggaggaaaatatattgcaccgcagaccatagaaaatttagcaaaagcttcaaagtttatcgagcagatcatggttgtcggagacggcgaaaaaatgccttgcgcattggtacagccagattttgaattcgcaaaaagctgggcatccagaaacaatctgaatgtaggttccactcctcaggaaattgccaaaagtgcggaattaaaagaaagaattaaaaaagagattgacgatatcaaccaacatttaggaaactgggaacagatcaaaaaaattgagcttaccccggaaatctggagcattgatgctggtcttttaacgccaactttaaagcttaaaagaaaagcaatcaaggaaaaatttatagatctttataataagatgtatgagcataaggaataataatataaaccgcttctgttgaggcggtttttatttttaacacgaatggctcgaatatcttgatgaatggctctatctaattatttcaaaataaagctattaaagttttccattgaataaaagtttttaaatattctttttctttataatcactaatatcatgtatttagtttatatttattttttaaaaactctatagagttttatctgtgtagacatgatattagaaggacgttcggcgttccgtaggaacgctatctttagaacatttatcctattatagatatcaaccctgcggattgattgatagacttgctcttatttctacacagattccgctcctaaaggagcaaagctcttttactttaaaaaacttcaatattaaattgtgctatctgcgaaacatttgcgcaattagtgtttaaagccaaaaaaaaagctgttccaaatttgaaacagctttatatctttaaaatcctaagtaattaaaatttaattacagatttcattctttcgttttcttccattaccaactcgtcgtcaacaaggatttttcctgaatgctcatcgatgatgattttctttctctgcgcaatctccatctgcttttgcggtggaatggtgaagaatgatccttttggagcgcctctttccaatcctacaacagcaagaccgtttggagagtttgttctgattctgttgtatgaagccaataatctctcatcaattttctcagagaattcttttgatttctcgataagatattcttcttctttctgagtttcagagataagaccttccaattcttcttttttgaatttcaggtgatttttaagctcatcaatttttgagttcaattcgcttaacgtttcgtttttgtgacctattttagcaccgaattctttaattcttttctctgcaagctggatttcaagctcctgatattcaatctccttacctaatgcttcaaactctttattgtttcttacattatcctgctgagatttgtatttttcaattaaagtttttgcatggtttattacttcatgctttgttttgatctgatcgtcctgatctttgatttctgcatgaaatttttcagctcttttttcaagaccttcgatttcaatctcaagatcctctacttcgattggcaattctcctcttgtatttcggatttcgtccaatctagaatcaatgatctgcaaatcgtataaagctcttaacttctcttcaactgaaatatcgttggtttttgccatattttaaatgaaataatttaccgggtttgttttctcaatagattttgagattgcaaatgtactaaatttttgtgacaatatttcaaataattgttgagttacaaattgttctgattcaaaatgcccgatatcacaaatcatcattttcgaatcggcaaggaaaaaatcgtgatattttacgtctcccgtaagataagcatcacattttttggaaattgcagaacggattccgcttgcgcccgaaccgcccagaactcctactcttttaatttttttattattgaaatccgaatgacggatcatttccagactgaatttgtcctttacaaatttcagaaaatccttttcatccatcggctcatcaagatcaccatacattcccaatcctgaataatggttggtattttcaaggctgtaaatctggtgggcaacttcctcatacggatgtgccgttttcattgcattaacgatctgtccctgtttgtaatcctcaaaaattacagaaaccatatcctcatctgcattctcacggatgttctgctgtcccgaaaacggatttgaaccttcaatcggtcggaacgttccatttccgttgattttgaaactgcattcgtcataaaatccgatatttcctgcacctgccgaaaataatgcttcctttactttttcagaataatctttcggaacgaaaaccgtaagctgtttcagattattttttttaggctgaagaatttttaatttttttaatcccaactgatcacagattccacggttaaccccaaaaaaatcattatcgaaagcggtatgaatggcgtaaatggcaattttattttcaatagcttttaaaacagctctttccacatagtttttacctgttaaagatttcagtcccgaaaaaatgatcggatgaaaacatacaattaagttacagttcttttcaatggcttcctctacaacgttttccaatgcatcatggcataccagaattccggagacatttctgtcgggaacaccacacaacaaacctacattatcaaaatcttctgcctgctgcagtggaattctttcttctattttggcaattaccttacttattgtcattttattgtctatgtttggtacgaaaatagggattatttgttaattttaaaaaaacatcgaaaaatggaaaaagagcacaatcttattcccgaagatgctctctggaaaagacacctttatcgcatcatataccgctccgacacaaagctcggaaagctttttgatattattttattgttgctgatcctcatcagtaccgctattatcatgatggaaagtgttccgaagctggataaaaggtttcattacacgttcattattatggaatggattatttccatatttttttctgctgaatatttttcgagaattgccgtagtgaaaaacaaacggaactatattttcagttttttcggaattattgattttcttgctttaattcctttttatctgagcttcatttttccggttaccaaatatttcctgattttcagaatgctaagaatgctgagagttttcagggttttcaatttaatggactttatgaatgacggttctgtaattgtgagggcattaaaaaacagttcaagaaaaatttatattttccttttatttttaattattttctccgtaattgtcggctcactgatgtttatggtggaaggcggaagacagggctttgaaactattccacaggcgatttactgggcggttgttactgttacaacggttggttatggcgacgtctctcctattacaccgatgggaaaattttttgccgtggttttaatgcttgccggttattctattattgccgttcctacaggaattgtaactgccgagatgagaaacaaaagacagaatctggaaaaagtgtgcgaccgatgcggaaatgaagatattgatgatgatgcaaggtattgcaaacagtgtggcaagaaattggcttagtaaaaatataatgatctattaacgaaacaccacaaaaatcatggaacctaataaaaacaaaccgaacagcttagtaattatccttatttcattgatcgcacttgtgatcttggtttattttatccttgttatgtttttccctgctatttttgatagcatgacgacgggtgaaattcagcctgttcccaataaataaagttttttcatttaaataacaaaggcgagccttacagaccgccttttattatgcttaaattttctttattttttaattgtttttacgacctgcttagaaccgtctttcatatccaacatcagaaaatataccccttgtttcaattctcccaaatgaatctccgaagtaggattttcgataactcttatcagtcttcctgaaacatctgttacagaaactgattttacttttgctatatcagaaatattaacaacatccctgaaaggatttggaaatactttaatggtatttttattggctgccacttcggaagttgctaaattatttttcgtaatgttaatggtaaatgctccttccggctcatctgaccaaccactgtaatgaccaacatttacataataggtatttcctgcaagtgtaggaacagaaactgtttcagcgcctccctgtccaccatcatctactgtactttcgcagtttaatgcagaacaatttccgctatacaccccgatctgaggatcaaaatcacttcctgcaggcatcgttacattaatattaaatgtacttccgtctcctgtaaaagtaaaccaggtaccatcattcatttcattagaacatacgcttacaattcccgagttattggtagctcccgctccatcgttttgcgcgtaagtataagggaaagcagtagcagataatgctccggaacaagcatcatttgccggtggcggagggaaagttcctacgcagatattaaagctttgattacttcctgcaccataataactgtacactctcaccagatatgtttctcctaccgtaagacccgatacaactcctgaaggcggatctgaacacaaaatacttgatagtgctccacaacctccgctgaatacctgaaaataagtatctgtatctcccgctgtacttcctacagaggtaatattaagaagagatattttatgagttgtagcagtggctacaaatttaaaccaaacatcatcatctgcttgtccataacacggacttggagcagttcctgaatctgttgcgccaattgtataccctgcagttactgttccgcagttcagattcgggtttacaggaattgtaattgctgtggcgcattcatcattagccggtggcggcggtgcagtagtaaacatctgctctgtacatcctgaagattctcctcccgaacctactgctacgattttaacgtaatgggttgtattcggagccaatgctgctgaaggtgtataactattggttgttacagaaacctgattcgctatactcgttcctcctggagaagttccgatagaaactttatagctcgttgctcctgctgtattgttccatgtgatggtaggagttaaaggaataaatgtagcattatttgccggataagtaactatcgggcaagcaggaactgggttggaagctagtccttcaatggtaacaactgatttataatttacaaggtttcctgttgcaggcggtgatgccggatccggatttgtaaaatcatctttataataaatcgtagaattttgcgctccactgtacacatatgttgcctcatcgaaatcattattatcataacctgcagagttttcctctgccgcaataacaagattagaagtattattgtaagcgaaaggcgttggaaaaactacttcgataactccgttgttattgcttacagttccggaaaaaacctgcgttaactgagctccgggaatccagtctgaatcggaactgaaggaagttttgttggtgagtcctaaataaactacccattgtgaagagtttgaaattgacattgaaggatctatatagaacttgagtcctgtaatattccctgctgcattggcgttaatttcctgctttgtgaaaatctgctgtacataagaataaccgtaatacgtacttattggagctaccccaacatctgtactccctgaacccaaagtaatctgggctgaaaaagtcatacttaaaaataataagcatgcgagtaaaaattttgtcataaactatctatattttgttgattgagtactaatttaacaataatatttaaattttaacattaattttaaatattattgataaaaaaatagcgactaaaaaaaattagtcgctattattatttataaaacgtattaaaaattattttttaatagtttttatcgtttgtttagaaccatctttcatctcaagagtaactaaatacattccttgtttcaattctcctaaatgaagttctgaagtaggatttgcaatagttttcaccaatcttcccgcgatatctgtaaccaatacgtttttaacattcgctacatcggaaatattcaatatatctgagaatggattaggataaactttgatgttatttttagcattttttacttcgtttgttgctaaaaccaatgatgcgtcataagcagatactttaaactgacctgttgtagttgaagaataattccaaacacccaccatcaacgtagatcccggcgttaatcctgtaagagctactaaagagaagttaccgtctgaagagctatcatcatcacagcctatttgtgtaagtgctccacagcttccactgtaaacacctaaaacagtatctgtaacattggaaccagaaacagattgagtttcaattgtaatatttccacttgcaggaactactacagaataccatacatctctgtaaccagttgtctggcaagaatgtgtagccgtagcatcagatgtagccgtagcaccagagtttgtagcagttacagcattttgtgcaaaagtaccaccaggcgttaaagcaattgctccggaacattcatcgtttgcaggcggtggaggtgctgttgtaaagcttctttcggagcatccctgagatgtagacatagcatcataagcatttaaggtataataataagttgtattataacttaatgcagttggaagtgtatacgatgttacatttcctaaatcctgagcattcataatattggaagcaccagctgaagtaccaatagaaagtttatagccggaaactccggttacagcagtccaggtaaatgtaggtgttacagaaacatttgttgcagcagcagaaggtgcagtaatagtaggacagaaagattttgtcgtgaacgttacaggaacccagattgactgatctgcagcactacaactagatctcacccagaaataataagctgtagcagatgctaagttaggcaatgtagttgttgtagcagttaagccagaaattgtaggcgttgtagtagcagtcggagctgtatttgttgtactataatacacatcataaccattcgcaggtacaggatttggtgcagtccagtttacaacagcagaattatacgttaaagttgcagcaggtactgtaaccgctgaaggctctgaacatgtaggagtaatattaatgttaatatcatctacgtataaattatattgattacttactgagtatgcattaaatccaaaataataaactccagatgcagtaggtgtaaagtctacaaagttagttgctgcagttgcagtattaatacttgggtgatctgctaaagcatttgtcatactggcattattcgctgaagtaccataagcaacctttagtttttcaacatacgttgtactgttatttccataggtgtacttaattctgtaagaaactcctgctgttaagttgattccctgagtatagaaccaagcatttgcatcattactaaaattgtacagataagtaagcgctttagtagtaaatccataaccagccggagaacttgttgtccagttatttcctgttcctgcattttctgaagaagtacaagaaggtaatgcaggtgttgttacactttcaaaatcctgaacataaggaacagttgtagatgtacatgcagttgtgaagctcaaaggacctgcccaagaacttgcagaacctgaaccacaattagaacgaacccatacgtaataagttgtgttagaagataaacttcctaaacttttacttgttgttgtagaagttcctgttgcagaagtcgctgccgtaggagcagtattagaagtagatacataatattcgtatccagaagccggcgccgaactaggagcagcccatgtaatatcagccgttgaaacaccaacatttgaaaccgtaggtgcagaaggaggtaaacaagcaggtgcagctccttgagaaaccgtaacatcgtcaaaataaacataattatctgatgtggacagtcctgattttgcctcaaatcttaaataaacatttcccgaagaaggcagacctgtaatggttgctgtctttgtggcacaagttgcagaaacaacgtgtgttccactattaatactgtaagctgtcgtccaaggacctgaagctgatgtggaccattgtagattaattacaccaaaatctgcagcactggctccagtagtgttacttgaatactgtgtaactttgtaagaaaaaccaactgtaagatctcctccgtttgttcctgtaagtgctggagaaacaagataagaagataagttataatagttgtttgctcttacacttgccgtaccattacatggggttgtagtatttcgactgaaagaaccagagccacttgtagtccatgagcccaaacctgtgggttcccagtcataggtatacgaaatttgcgctgaagctcctattccaagagccatcatgcacgataatagaaattttttcatgtttaagtaaaaataaaattaggtgatgtaaaagtaaaaataaattttaatttaattaaccaaaactttataaataattcatatttaatactaaaacaaatcattatcaaactaattattaaacaatcatttgaatagttaaataaataacaattttaaaactaaatataataaactgtttatcaaaaagttaataattagtaacaataattaatttacaacaattaacataataatttattttcgaataacttataaaatttttataaaaaaaatagcgactaataaattagccgctattattctctattaattataaataattaaatttattttttaattgctttaatagtttgtctagaaccatccttcatttcaagcgtcactaaatacattccttgtttcagctctcccaaatgaagttctgaaataggatttgcaatagttttcaccaatcttcccgcgatatctgtaaccaatacatttttaacatttgctacatttgaaatgtttaatacatctgcaaatggattaggatatactttgatgtaattcttggtaccttttaattcatttgttgcaagtattgtagattcttttaagctgatatcatccaataatagattatcatagaagtatccattacccgctacatctttatctaccacaaatcttacctgtacagtcttaccaatatatgcagctggcaagactaaagatactgttctccaagtcgatgcattggacgtgtctgcaaaaatagtttcccaagtagaagaattaacatccttgatatcaaccgtaagtttattattgtcataagccggctggctggtagggtttactcccgtcccatgattcttaaaccatctgaactccaacgcaggatttgttaatccagttaaattaaccattggtgtcattaatgtcacatcatgaactcctgtgtatgggctggacgcatccacataagcaaactgtcctgcagtattattctgccccgcagcactataagttgtaccatagtcctgagtagaactaccaaattgccaaagtgcataacccgtgttatttgtgcttgatgtagaccaacaattcggagcagctcctgaattaaagttttcagtaaacggtactgagaaagagctacataaagttgtgaatactgcagagcttgaccactgacttaaatctgaagcactacattttgatcttacccatacatagtaggttgtagctgcagaaagacttcctaaattctgagacgttgtcataaccccagtaatagtaggaacggttgcaccagtaggagcagtgtttgacgtactatagtatatttcatatccattagctggtgctgtcgcaggagaagtccatgccaatgttgctcctgaacttgtaattgcagatgtacttaaacctgtaggaacatcacatgtaggaatagattctacgataaaattatctacaaagaaatcataatcaggagcatcatctactgttccatcacttccatacattgcaaaaattacattattcccattataggctgttaaattaagagtatatgtatttaaagtgttaccaggagcattagaagcattccaagtctgaagaaccgtccatgtagttccaccgtcagttgatactacaaactgtataacatcgtcagaccccatagcacttgaagtcgtaacaccatatgctgttaaaccataatcaaatttaactctgtacccccctgcagacaaattaaacgccggagaaatcaaccaaccatttctagcagttgaatacagatttattcttgctgcacctgtagaaccggaatttaagaatccatcttctatccagtagttggtagtacccgttcccggtcctgtagccggtgatcctccatttaaacgagaccagcatactccagggaatgtagaaaaattatttgtgtaacttggagtataagcaccacaaactgtcgtaaagtttcttatagtacatgaagaagaaattgttcctccattatacgcatttaccgtataatagtaagtggtagaagtatttagtgccgtacttaatgtataagtagtaacatttcctacatctacattatttaaaacatcagttcctccggaagttgttcccatagatattttataacctgtagcaccggtagtagctgcccaggtaattgtaggtgttgtagaaactcccgttgcagcagctgcaggagcacttacagaaggacaactaatgtttgccgtagtaaaagatctttcggtgcatccggtagcacttcctattgaatttttaggtattacagtaagataatattgctgattgaagttgagaggtgtacctgaggacactgtataagtagtaacatttcctacatctactccattcataacgtctgtacctccagaacttgttcctaaattaatcacataactcgtagcgccattttgtcctaaaacaccagcccacgtaaaagtaggagttacagaaacacctgtagcattggcagcaggagcagaaattgtagtacatgcaggagctgcaacagcaggagggaatgtaacatcaaatccaattacaggtcttctgtagttcgaactggtaagtgttgctgtaaaagcactggatgtgtttagatacttagtggtattattgtttgttgtagagatacaggttgttccatattcataatcccatgtaatacttgaagaaggagcagttgtttgagtgtactctagatatactgctaaattacttccggaagtataagaaaaattagttgtatgggcaaactgcttaaatccagcagcagaaccaacagcggcagcaggatctgaatcgtaaaccaatgtagcagttgaaatttcagtagcccagtccggagaagcagagccaaaatcagtcgccgtagtaagtttcagataaattttaaaattggtacccgcaggaagagaaccggaagtagcaatccttctgaaataagttccggtaattgttcctccgtttatagctgcaagttgtgaagcaggaagaataaaagcagtcctgtttttgttattagtcgtggtagtactgttcattggtccgtacgtattagatccaatccctgttgaacaggtcgtgacagtaaaattttgtccctcatagctttgatatacaaacaagcacatcaaaagcaagaacagaaaattgagctttttcatttctttagcaaattaaaattaggtactgtaaaagtataaataatttttaatttaattaaccaaaatttcacaaatatttaacatttaataataaaacataaaataaaatacattattattaaacaatcatttgaataattaaacttatcacaattaaataacaacccataagaaactgtatatcaaacagttaaaaattactcccaaataattgatttacaataatataaaacttaacataaaaaaaatatagactgtccttttgagacagtctatattacatagaattagtgagtcctatcctatcaaataatcttttgacatgccaataaattactgaatcttttcgatatccctcaatatcgtaaccatcagcttaaatttttcttctttttcatttaatatctgtaacattccctttcaaggttaactctgtaactccatcatcaaaattaccctcgactaatattgtagcagagttctttcctaaaactgcttttttaggaataaaacgagcctttatttcagtttgctgattaggcataatgggagtttttttgtaatcaataacggtgcagttgcagtttggaagtactttattaattgtcagaggttcatccccaatattttttattacaaaattataattaacagtatctagataggtaatatttccaaagtcatattctctgacaggtatatctgcttttcctttcagctcaatataataatacttttctcttttgtgtgttattaaagctattattaacatgactaaaattaagcctataattatgataaaactttttttcttcataaatgtaattaattagatggaaacaaaacttctaaaccaatcattggattaacaaatcccatattgcttcctgttgaaccattcctccatcctgtgttatgatagttagaccaggttataggtttgttttttttgcttatagtgtatcgaaacatgggtccgaatcgagcatacttgtctactttaccttgtgtattaatcaattcaacaccaatacaaatcccatttttggggaacctaatgttataatcttctacatctatccatagcctatatttttggtttttaggattcacatatacatttttactatatagctcttctccgggcttattattagtctcatcatatttgtaaaatttaatattaaacatagctacatagtcgacattatctcttcttttcaaatcaatatacactcttttaacttttccgctcttctcagaaaacgagttttcgatatatacacaagtttcatatccaattaatgaagtcattccaacattaccttctttgctttctccaagcagttcctttttattgtagtcaattttcttttgagatagcaccacctcttcaatattggaaacttttatatcaagcggtacacttagaattacgttctctttattcttaaaaccggatagaggaattttttttggcttatatcctaatgtagatactttcaatgtatcataaatactatttcttatatctaattcaaattgtcctatttcatccgaataaataccttttccattaataagaacaatatttacataaggtattggcttcttagtcattgaatctgtaacaattccttttataatttgggcataaaagagattacaaatgattagtaataatgctgtaactatttttttcattctttgtttaataaaaatccacctcataactaaggcggattgacgtaaataaaattttaaactttttattttcttctatacccttcaatatatatctttttgatatacggataaaaactgccataaaccgtaataccctgataaaaattacccagtttttcaaatttcatgtttacagagatcgtttgtgattgattaggcagcatgatgctatcatactttgatatttcattacaggaacagggaggctttactataagggatcttaaattcctttgccctctgtttttaatagtaatatcaatctttttactttctccttctatcgtgtctaaatctataaactcaggaatttctattttggttaattgattttcgggaatttttgagactcttttgtaaatttcatcactattcttaagattgaagttattacttttcactttcttttcttctttgcaagaaagcaaaaagacaaatgctacgattgcgtattttttcattttaaagtattaattgtttactgtaaaaccttaagcttataaaagtaaccattaatcgttgactttttccatgccttatactgtggaaaataagaatacatataagtatctttattcattttcaataaagctgtttttgtagtatctctggataaataataaaatgatacaaaaaagccgttatctggatatttcatgatttttggcaggataatttcccattttttatttactgtctctgaaatatctctttggaaagacataattggattatcaatatctggaaatccattgatattaggtaaaatttgaatatctatatttccttttatatcgtgaggaaaggaaataagatttggaaaaaaaataatagattttacaaatgtttttttggatacttctattttaataaaagtagcgttaagattattagggaaaatagatgcagaagaacgctttaattcgttactcttaattgtcttttctttcctattaacattttcatcgtttgagatgtgcacttcttctatctcttttaccttatcaaaaaaaaacaacgtgtcttggcttaccgaaaagtccaataatctgttgttataaacaattttatcatcaggctcaaaagatatatttttaaaattagccttgtttatttctatgtttttaccttgatgctttacaataacatttgcaaatgttttataatctgaatttctaataaaaatttgacttttgaaaatggttacaaagaataaaaaggaaaagagcaatgctcttttccaataattataactcttaaaattatacattaacatggtctaaattctgatgtagtataagtgtcaacagcgatccacattacatagtatacatgatatacttcacattcacattttgcagtaccatctgcttgaatttcgcctgtaggagaacagtttccactgccaattgtttcacttccccaaaatcttctctcagtctcagaagaatccccacctttacttgttgcggatgataatgtaaatacagatgctaatcctaaagcacctattaaaagtttctttttcataataaaatgttttttttaaataattttttaatccctacttatttcatccagaatccccaaaaggtaatttccagactttactttcaaaagaagatgttatcttcttaattaagaaggcaggttttcggattgtcctgccgttggaaatatttatacagtctgttcggttttttaaaactttctgtgctgtcctttcaatacgcaaagtaaaaacggaacattcttaaaaatatttcttaatgttccgcttctttatgtaattttttggaataataaaggtgcggaactatgtttactgtcttggaggtactggtatacctgagaaacaaataaacaagcccgcaccaaaaaggtacgagcatttgcctattcttgtttctcttaaaattaccagttttaccaagacaagaaatagctaatgctatattatttaaaacagattaaatctgtgttttttttctaaaagcaattatacaataattattttaataattcaaaatgaatttcattgtaagaagcaataaaagataatatgctccctcaggcatttgatcttcggatgctcccgaaaacacattcctttgggcgaaacgatttcggaacttcccgaagatgttttccttttggcggaatacatccggcgggttccgaaagtccgctcctttaggcgggacggtttcggctgttcccgacagctccctcccttcggcggtggctctaggaaggcgtttccggagattcaggtttctgatcttctcccccgctttcttccgtactgctatatttggtaacggcaagattatattggtttaccagactgctgagctttgccattaactgatcgtactctgcattcggggtaagcagggcatgagcttctatatgctgcttcagcgttcggtaagcttccgtagatgctgttctggcagtagctaatacacctgtttctacttccgaaagctgtacggtacgggcaatatacttgttgttaaaattctggttggaagttttcagttcgtctacccaagcagtaagttgaagctgggagattttatcgctgtgcttttcttcccattctgccacgatgctgttaatagtggcagtttccaactgataccgaagcttgtagatacgctccccaaaacggttaaggatatctaaaagtgcaaaggcattgttcttggtcaccggatcgaaatggtactgccatgcttccaaaatcatcttgatcccgataacagcgttgtctctctgcgcatccagagcctgaatttccggtgtaatatcgcttcccgtataaggcagataagcattattaaaactttgtgccgctgtttgcaaaattgttctttggctgccaatatttaattggtcggcagtagtttgaggcaaaagttccagtacattgttcacgaattgcagaaaatctccgttacggtatttttccagattggcggttgtaatcattgtgttattttaaaattttaaagggctaatttataaaaaaattgaaagcgtttttctgttcaggtatattttacgaaaaaaattctagacaacttcaaaatttgggctgtgataaggttttcatagtaaagaattttcatgaaacatttatcaaaaaacagaggctatccattgggacagcctctataattcatgctcagagtatggttaataaaatttactttttaattgctttgaaagtctttttagatccatccttcatatctaaagtaattaaatacattccctgctttaattcatttagattaactgatgattcaggattagcaatggttttaattaaccttcctgcaatatccgtcacataaacggctttcacattagaaatatcagatacattcaaaatatccgtaaaaggatttggatatactttaatttcgtccttcgtaccggataattcgtttgtggcaagcggagcggttacaatgaatgaataatcaataatttctccccttgagaaacctaaacaaggatccgttggtgcactgttgttgtaattgatcaaaaccctcattctgtaagttcctacagatgtatttgcagggatggtaagtgttgcaccgcttgtggttgtagtataatttgttgttgcaaacagtttttcggaagcatcaaaaacattattctgatttaaatctacccagacagcaaccccaaccgtaggtcctcccgctgttatcgaaataggaataaccgtattagacgcagattttgtaatggaaatattatttgagctcatcagatttttatatccgaaagttgctgcactgttcgctgttgcagaactgtacgccatattggtattggcagtagtggatgtaaatgagctgatccatgaattctgattggaagttgccggagtacagtaattgcttgtataaaatcttgttccgccttcccatgcactgttatcagtcgcagtacatttagctcttgcccatacgtagtagaaggtatcgctggttagtcctgtcaggttagcagttgtacccgttccacttgtacttacagaatttgaagcatttaaaacagttgtcgctgtcggtgctgtattggtggtgctgtaatagacatcataccctactccaaccgtagaagaaggtgccgtccagctaatcgcagctccgttagctgaagtggatgctacggtaattaatgtcggattatcgcagcttggaataggctgaatattaatatcatcaatcccgattcctctgtaagttcctcctacaccgtgtctgaacgcaagatactgatctgttcccgccggaatatttaccgtatactgagccatagttgatgttaaagtaaccgcactgatctgtgtaaaagtagaagcatcagcaggattgcttaacgttcccacctgaagcgtatagcctgaagatcctcccgcagccatgaaacgaaccctgtttgctccgtttgaaaggggtgtaatttgtggtgaaaccaacattcctcctgctgtagtagctgtatcattatataaatagtagccatttggagcagaagaattatacgatgtatttacatagccatatcccgcccaagacgacggttctaaatatctccagcaggtaggcgcatttgtattgctgctgcttcctgtagatgtggtatcgaaattttcaaataccggaagagaggttacagccgggcaaacagttgtaaagcttctctctgtacagtttaaagagctttgagttgccgtatatgctcctacagaccaataatataccgtactgtaattgagagaagtaggcaacgtgtatgtggttacatttcctacatcaaaattattaagcacatcattcccgcccggcgttgttcctattctcagcttgtagcctgtaactgcagacgaggaagaagccgtccatgtaaaggtaggcgtaagcggaacattaatagcagatgctgcaggcgcagactgtgcaggacagatagaaagtgtggtaaatgttctttctgtacatcctgttgatgaaatcgtagcattataggcattaaccgtataataatactttgtgttataagttaattctgtcggtaaagtatatgttgatacatttcctacattcaaattgtttaaaacatctgttcctcctgaagttgtccccacagataatctgtatcctgtagcttccggatttgccgtccatgtaaatgcaggcgttacagaaactcctgttgccgccgaagaaggcgcagaaactgtaggacagaaagttttcgtcgtaaaagaagatcctgaaacccaagaactctgctctgaagcagaacaacgggatcttacccaaacataataagttgtactcggcgttaaattggttattgtataggttaaacccgttgctcccacaacattgggcgttgttgcagcagtaggcgctgtattcgtcgtgctgtaataaatatcaaatgccggtgcaggatttgccatcgcccagtttaccggagctgttgtagacgtagttgttccgggagttactgaatccgggaacatacaaggaatggcagaaatatttacattatcaatataaatatcgttgcttccgttatctcctgtagccataaatcttacaatcgcggtcggactgctcgttcccaaatctgcatatttggtagcccatgaagcagaaatcccctgagtagaacccacctgattgaaagtgtttccgccatccgtagaaaccaaaacttttaaaacatcagttcctgaagtattctgataatcgtaagacaaaagcctcgatcctgttcctgaagataaattgatatacaaatccatgtatcctgaagcattgatcgtattgtacgaatggaatcttgctgccggagctacacccggtgctgcaacagcaacgtttccgcctaaacttgtccatcctgttgtacttgcgtaaccacttactgtaatgtcacttgctctccatgagttatctcctctcgaaggccaggttctccaatagttggcattgggaagatcgcctatggaatttccgttttcccatgtactgaaactttcagtaaaaggaatagaagcataatttacaggaggtgcaatccatgttcccggagaataagtaaacgtaagaccggaagcaggtacagttgtagaattggcagttcctaaagtaacggaatctgtacttcctgttcctatggaagttgccgtccagtctgttcctactctgttgttggtatcagaagcttctgatcctcttattccgacctgtcccgttaatactgcagtaccggaaacacaattcccgtagacaatgcttacattattagaagttaaatccaactgaatctggaaattaagaagctgcgcagcagatgctgtacttccctgaagatctttaaactggactataaatttagaaccaactgtttcgtaggaaatttcagaagttgtagtattggcatttttaagattgactgcaaaaccggcaaatgcaccttcgtaaggagtcgtggtatctgtagaaagccctgtgtaagtggccgccaaagctggtgttccaagggttacaaaaccattattgctaaggtaaacagcattataagatttaccattgaatttaaaagctgatggtaaactaattgcagcagaaacagcatccgttcctaaggtggctcccgactgccaaactgttctggaggctgaaagcggtgtgtagattcctgtagtctgcgtaaatccgtagccgttattggtattcggattggtcgcctgaggcggtcccacctgtgcaaacgttgccgatcccaaggcaagaagacacgtgagtagaatttttttcatatatcaataaaattaagggcggtaaaaatataaaaattattcattaaacctattaaaattcagaaattcatcattatttaatgttaaaaagctaaaatattttaataaaaattaaacattcatttgattttaacagagaaataaaaagtgggattttaaagttgatttatgttatggatttaaaagatcaccaaaataaaaatggctaaaaatctgatcaatagattcatagccactttaaatttatatcaacggagttttaaacttaattcagataaaattcatatttatttaataactgaatttctttaatcagctctccgctgagatttacggaatgtttcatcgactgtacttcaagatgttctaccttcgaatcttcttccacatttttcagataaaatttcagcttctgcgttccctgatttctttccagtacttttctgaaaaagttaagatcttccggtcggaaatccatcacatccatcaccaaggaaatactttttgcaaatctttcaaaagcttcctgaagctcaataacatccgtaacattcacaaaaacccttccgtcttttacctgagcaaatttaatcttgaaaattacaaaccgctgaacctcaagcttttctttcagtttcatataatcacggtctcccagtcggaaagaataggaaccggaatagtcttccagcgttacaaaagccactttttctccgcttctgaagccatcttttaccacatattcggtaatcagaccggcaacagtatattcttttccgccaccgccgttttctctttccttctgtaaggttttccagtcttttttcttctcttcgaataattcttcctgcttattcgcaaaagcctgttctttataagcatctacctcatccagattcaggaaatggaaaacaccttttggttctgcttttttggtgacttcttcaataagttcctcttcttcacccgcaattacatcatcggaaacaatttccgcaagttcagatacatcttccggaacgtcctgctctaagatcggaacctcatcaactacaattttcgattcatcttctttttccagaacagattttttggaaagacttccctgtataaacttgaactgatatttaaattcatctaaaggatgcgcagaaagatagaatcctatggtttctttttccttattcagcttatgcatattcggccattcgggacacggaggcagcttgggctgctcgatctgaacttcctctgcaaaatctgcaaaaagagaatgttccatttcatttttactttcctgaaagctttgtccgtaacggatcagtctttccagattggttcttcccgccatatcaatatcgaaatactgacctctgtggaaattgtcgagttcatcaaaagctcctgccaaaaccaaactttccgccactcttttattcatttgtgaaggcagaattctttcgaagaaatcatagatatttttaaatctgccgttctgtctttctcttgtaatggcttcactcggaccttcaccaatacctttaatggctccaagaccaaaacggatctgtcctttttcgtttaccgagaatttgtactgagattcattcacatccggtcccaaaacatcaacacccatacttttacagtcttccatgaacatggtgatggaatccgtattgttgatgttgttactcatcacactcgccatatattctgccggataattggctttcagataagcggtctgatacgcaataaatgcataacacgtagagtgagacttattgaaggcatattctgcaaaggctttccagtcgttccagattttctctaaacgttcttcattgaggttattttttcttccgccttcgatgaatttcgggtacattttattaagaacgtcgatctgctttttacccatcgcttttctcagcgtatcggcttcccctttcgtgaaatttgccagtttctgggataaaagcattacctgctcctgatagaccgtaattccgtaggtttcctttaaatattcctctgtttccggtaaatcgtagacgatttcttcaattccgtgctttctgttgatgaagttcgggatgtattttatcggaccgggacggtacaatgcgttcatggcaataagatcggcaaaaaccgtaggtttcagctctctcatgtacttttgcattccgggactttcatactggaaaattccgaccgttcttccctctttaaataactgataggtttttgcatcatcaagcggaatcagatccggatcaatatccactccatgccttgcttttacaagttttaaagcatctttaataatggttaaagttctaagccctaaaaagtccattttcagaagccccgcactttccgccaccgagttatcaaactgcgaaacaagaatatcggcatcttttgccgcaatggttaccggaaccagattacttacatcttccggcgtaatgataaccccacaggcgtgaatccctgtatttctgatgcagccttccatttttttagcactcgccaaaacaccgtgacgcgcatcattcgggctgtcgagaacgtagcgcatttcgtcaacaagctgttgttcttcaggttttaatttatcgtattttgctaaagctttcgcaatattcattcccggtgtggaaggaattaattttgcaatgttattcgtgtccggaatcgggacatccaaaactcttcccgcatctttaatcgcagatttccctcctaaaaccgaataggtaataatctgggcaacctgtgtttttccgtatttatcaactacccacttgatgattttatcacgtccttcatcatcaaagtcgatatcgatatcgggcatggaaaccctttccggattcaggaatctctcgaaaaggagatcgtatttaatggggtctacgtttgtaattccgatacagtaggctactgcagaacctgccgcagaaccacgaccgggacctacccaaacgcccattttacgggcttcgttacagaaatcctgaacaatcaaaaagtaaccgggatatcctgtattggcaataacttccagttcgaaatccagacgttctttaatttcatctgtaattccggtttctacatatcttctttttgccccttcgtacgtcaaataggtaagataagccatctcaccgcgttttccgccatcaatatcgtcttcgggatgaataaattcttccggaatatcgaatttaggaaggagaacgtctctttttaaagtataaggtttgaactttgcgaaaaattcttcatacgcatcgaatgcatcgggataagccaaaaatgcttccttgatttcatccgctgttttcatgtaatattctccggtcgcaagtcctcttctttttccaaaaccttttcctacaggtgttgaaagcttttcaccatctttgatgcagcttacaatatcctgaatattagaatcgtctttattggtatagaacgtttcattctgcgctaaaattttaacattatatttatcggcaaaatgcaataacacgtcatttaaatgctcttcttccggcaatttatggttctggatctgaacataaaaatcgtctccgaaagtatctttccaccatttgaaaagctcctcccctttctgttcaccggtatttaaaatggcatcgggaatatctccgtgaattcctgaagttaaggcaataactccctctttatattcggcaatcaattccctgctgatcctcggaactccaaaataaaatcctttaagaaatccgatactggatagtttggctaaatttttatagccgttaaaatcttttgccaataaaacaacctgcgttcttcggtcgggatcatctttggtaaactgcttctgctcgtaacggtctgaaatataaaattcacatcccaccacaggaatcagaggttctgaaaccggttccggctcattaaattcttcgcctttttcttctgcttcctgctttttagccagatattctttatgctttttcgcacggtcgccgtttgcgccttctaccgcagaaacaaatttgaaagctcccatcatatttcccagatccaccattccgacggcggggaaattatcatcagttgcttttttaattaaatcgttgatgcttgtggtagccgttaaagtagagaaaacactgtggttatcaaagttgaaatattttccgagatcgatctcatcaatacttccgaaatcctgctgtttcttcttgttgtgaaaatccgcaacctgtcttctgataacaatattgaaaggttttatcggatccggatacagcgttttaaaatacgcaagctgatcttccgaagttttcagtacttcagcaggaatgaccccgattctcatcatttcgaagaaaacctgcgccgtagcatttacgtcggctgctgcgttgtgggcctcatcaaatttatgaccgtataatttttcgtaaagttcttccagcttcggagctttgtatcttcctccttttccgcctcccaactgacagaaatctgttcccagaatcatggtatcggctttgggcttttcctgaaggttgtctttgatatttttacggtaaaattcggctcccacaatgttgtagtcaaactcaacattgtgtccggagaccactcttactttttctaaaactttagaaaattcatttaaaatttcttcgagatcacgaccttcgtcattggcgatttttgtagtgatcccgtgaattcttgcggcattgaagggaatatcatacccttccggttttataatataatcctgattttcaattaatgttccgtcatcttcatgcaactgccacgcaatctgcaccattcttggccagttatctgaatctgaaagcggagcgttgaaattcttcggtaaacctgtggtttctgtgtcaaaaactaaatacatgtaatttttctagcttttattaaaaaagagaatgtaaagttactttaattttttgtcttttggaattagtttttataaatgctgatgaatcatggtatgcatatccggttgggataaatctgtttttttaattaaatcacccctcaaaaaccctgaaagtcattgaattatccaaaaacactaacgattgttagtattttgattttttgtttatctttgctttctatggaaaatacacttcacgaaaaggtttctcaagatatattactcaaggcttataaccatatgatgcttgccaaagcaatggcagatatttatgaagaaaacagaaatgtctgtaaatatgttcatagtacatcaagaggtcatgaagccattcagttggcaacagcttatcagttaaaaaaagaagactgggtttctccttattaccgggacgaaagtatacttctcgggattggttttgaaccttatcagttgatgcttcagttactggcaaaagccgacgatcctttttccggaggcagatcttactactctcacccttcaagcagggacgaaaataaacctaaaattattcaccagagttccgcgacaggaatgcagaccattcctacaacaggagttgcgcagggaattaaatatattcaggattttgaattgcagcagtttgaaaataatccggtggtaatctgcagtctgggcgacaattctgtaacggaaggtgaagtaagtgaggctttacagtttgctgctttacatcagctaccgattattttccttgttcaggataatgaatggggaatttccgtaaccaaagaggaagcaagaacgtgcgatgcctatgattttgtagccggttttacgggtttaagcagaatgagagtggacggaacagatttcgttgaaagctttgaagtaatgaaaaaagcggtggattttgtaagaactgaaagaaaacctttggtggtttgcgcaaaaacagttttaattggtcaccacacttcaggagttagaagagagttttacagagacgaggaagatttaaccaaacacagagcgaaggatccgggaaatattttaagaaatcatttgattgaatccggagttgatgaagaattattaaaacagattacgaaaaaggcccgtcttgaagctgaagaagcttttgaaaaggctaaaaacgcagaagatccgaagcctgaaagtgtaatgaatcatgttttcgcgccaactccgattacggaagaggttggaaccagagaacctgaaggcggagaaaaaattgtgatggttgacgctgcaattcacgcgattcaggagctaatgtggaaacatccggaagctttgctgtacggacaggatgttggggatagaatcggaggggttttccgtgagacggtaacgttaggaaaaaaattcggaagcaaaagggttttcaataccgcgattcaggaagcttatatcattggttccacagcgggaatgagcgcagtaggattaaaaccgattgttgaagttcagtttgcggattatatttatccgggaatcaatcagttaattacagagatttcaaaatcgagttatttaagtcagggaaaatatcctgtaagcaatatcatccgtgttccaatcggagcttacggcggcggtggtccttatcacagcggaagnnnnnnnnnnnnnnnnnnnnnnnnnnnnnnnnnnnnnnnnnnnnnnnnnnnnnnnnnnnnnnnnnnnnnnnnnnnnnnnnnnnnnnnnnnnnnnnnnnnnggattgtactggagcaaggttccgggaacggaagatgcaaaaaccattgaacctgcggaagattatatattgcctttcggaaaaggaaaagtaattattgaagcggataaggaagaaaccgaaaaaggcagaactttattgattgtcacttacggaatgggcgtttactgggcaaaagaagcagcgaaaaatttcaacggaagagttgaggtgattgatttaagaactttaattcctctggatgaagaactggtttttgagagagtaaaagcgcatggaaaatgtattgttttaacggaagagcaattaaacaattcttttgcggaagcttttgctcacagaatttcgaaaaactgctttaaatatcttgatgcaccggtagaaacgatgggttctctggatgttcctgcggttccaattaatttggtgcttgaaaaggaaatgcttccgaatgcggaaaagctgtccaataaaattgaagacatgctgaaatattaattcagtttaaaataaaaatgtaagcctctaatttttttagaggtttttttgtgtcttaatttcttatatttatgtactgctagcaaaaggttttttaaattctgtttcaaaaatatggtatctgttttgcttagtcttttgctgactttaaattaaattgcacaaatatgattacaacaaaatacgtcaattacagacaggttctcaatttatcaggatttcatgtgatcctgatttcaatctggtgcactttaattgctgtgctttttcatttttttcattgggactggatgattattccatgggttccggtagcattgattggtactgcggaagcgtttttagttggttttaaaaacaaccaggcgtatgacaggttgtgggaggcaagaaaaatttggggcggaatcgttaattccagcagaatgctcggatcgatggtatatgcttttcatacttccaatgaagaagcggaaaagtctgatctggaagaccgaagaaaaaagattgttttccgtcatattgcatggctgtatcagttaagggaacaactcctgattcctactgagtgggaacatattaaagtggaagaagaccagcttaaaaatgtagaccacaagcgtaaccgactgataaaagcaggttttccggattacggaagaacgccaatattcctgaataaatatttatctgaagaggaaactgaattgcagtctcagtataaaaattttgcgacttaccttatcgctcagcagtcgaaagatgtaaatgagcttaaaaatatgagtgcgatttctgattttaatcaaaagcaattgcaggattgtcttaatgaattctatacattgcagggacaggcggaaagaataaaaaagtttcctttgccaagacagtttgcaagtactgcttttatttttaatatcattttcattatgcttcttccgttgggtttggtgagtgaatttgccaaattgggagactggggaatatgggtctcaattccgttctgtattacgattggctggatttatattattatggagctggttggagattattctgaaaatccttttgaaggtctgatgtttgatattccgatgctttcgatctgccggacgattgaaattgatcttctgcaaatgaccggagaaacggatttgcctgatcctattgcttctaagaatggggttctggtttaattaattgtcttcaattgaaacagacctcagtttagccccgattgcagctttgtctgagctcattttcagtgatttggggttgcggcggcttcgccgccgcaaccccaaatcactgaaaatagcgagtgcggaaagcgggaaaaagctcctgaaaaaaactttttcctctacaaaataattgccgttgtattttttacctcagagatcatgaaagagctgtgtgtacttgcaatatgctgcaatgtggtaagttttgtaagcataaaattacgatagtcttccatatcttttaccccgatttttaagatataatcgtaatcaccacttacatggaagcattctgtaacctcttctaaattcatcacttctttttcgaactgcaggacgtattcttttctgtgctgagcgagtttgatatggcaaagcacaatgaaattgcggtggattttgttcctgtccagaatggcaacatattttgaaatcactcctgtattttcgagctttctgatgcgttcataaacagccgtaacagacaaacctaacttgtgagacagctctttggtggtttgtttggcgtcttcctgcagaaaaagaagcagttttttatcggtatcatcaaaagtcatagataaattttagttaaatgtttattaaattcaaatataataaactttttttctaccatttaaaaatatgatagatttataatctgataatttaaatttctgttgtaatagttctgaaggttattcatatttatagcataaaaacttaagcgatatgaacgactttaatgcagccaacgaaatacaggatttgcaatatttcggtgaatttggcggagtaaacccatcgatttccgacagttctacttatacttttctttctgcgaaaaccatgttcgatactttcgaaggaaatgcggaaggatgttatttgtattcaagacattcttctccgatgaatctgtatcttgcgcaggctctggctaagcttgaaaatacagaagcagcaaacgtaaccgcatcgggaatgggagcgattacttcggttctgatgcaggtctgcaaaagcggagatcatattatctcgagcagaacaatttacggcggaacgtatgcttttatgaaaaatttccttccgccatttaatattcagacgacgtttgtagacatcaataattttgaatctgttgaaaactcaattaccgaaaatacaaaaattatctactgtgaaagtgtaagcaatccgcttctggaagttgcagaccttagaaaactctctgaaatctgtaaaagacataatctgaaactgattgtagacaacacgttttctccgctttctatttcgccaaagcttttgggcgcagatatcgtgatccattctttaacgaaatttatcaacggaagcagcgataccgttggcggagtgtactgtggaactcaggagttcatcaatgatactaaaaacgtgaataacggagcatgtatgttgttgggacctacgatggacagtcttcgttctgcaagtattcttaaaaacctcagaacgctacacatcagaatgaaacagcacagttataacgcaatgtatcttgcacaaagatttgaagaagacggattgcgtgtctcttatcccggattaaaatctcataaaaaccacgaactgatgaaaacgatgatgcacgaagagtacggattcggtggtttgctgactttagacgcggaaaccacagaaaaagccaatgaactgatggaattaatgcagcaggaaaatctgggttatcttgcggtaagtttaggcttttataaaactttattctcatgctcaggaagctccacttcttctgaaatcccggaggaagaacgtgctgcgatgggaatttccgatggactgatcagattctcaataggtctggatcacgacatcgaacgaacgtatgaaaagatgagagaatgcatgctcaaaacaggcgttctcagccatgaaaccatctccatatcctaattattgtaaaaaagctgttgttgattcgacagcttttatttttttaaccgaaaatgttataaaagatattttgtatgctaatttttgcagcacctcaaaagttcaatgtattttttttagataagtttcgcgcctacagagcaatatttactgtaattgaaaatcatagttttttaacgcaaagtttaattttaaatacccattatttaagggagcaaagaagaatcaacaagttgatttgatgaagcgtatgtttcaagctttgctaaaaaatctttgcgtcaaaaaatttacgctaaaaagtaatacatcaaaaattttagtggtaagatcaaactttatgaaaatgtttcgggaaggcgtcttcgggtttcatcctgaaaatatttaataaaatccacgattttaagaagccataaccgtaagaaaacatctggatgtaggttgaaataaccgccattccggcaatgcttatatttttggtgacccacaaagcatggaaaagtaccataaaagtatataaaccataaaatgcaagaatgacgccttttcccagaatgaaatattctacaaaacccatgatgtagcccaacataaataaggtaggaaatgcgaacgaaattttcacataattcggatgtctctgattaagaattggtcttgcacagccaaactgatagacctgttttgaaaattttccgaaatctacccttcgtttgtgatagactgcaatatcatcgaaaaaagcagtggtaaaaccattttcccaaagcgtcatagaaagatccggatcctctcctattctcatttctgaaaaaccaccgactttttcgaaaacctctttttttacccccatattaaaacttctgggctgaaatttcgaaaccgcttttttacttcctctgattccgccggtcgtaaaaacagaagtcatggaataggaaatggctttctgcattaaattaaaacctttatgcgccttatctgctcctccaaaagcatcacatggaatttcaagaatatcttttttgatgttttcaatgtaatcgttctctacaatcacgtcgctgtctacaaaaaccagccattcattttccgctcttcttgctccgtaatttctcgataaacctggtcctgaattatctttccggaaatatttaatggttaaaaaattttcgaattttgtaattgttggttttaagtcgattaatgagccgtcatccacgataatgacctcaaactctttgtctgtctgtgcagtaagagaattcaggagttcaaaaagttcgtctttacgattaaaaatagcaacgataatggaaatggtaggcttcaaatctgaaaatttttcaaaattacttattcaggaaggaatgagcaaaaagattttggaaattaacagcttattttagatgataaatagcaacattacacctcaataattgatttttaagtatttttgatctttaaacataaatatgatgagcggttttagagaatttaaatattctattataatttttattattggcttaattacaacttcctttatatttataccctcatattggttatttaatattcatccttttcctccaaaattcggattcggaacatggatatttgccatcttatttacattaattcctgcttattctattgagatgaaattcatccaaaaatttaggcttagtgaaaaaagaaaagatatcattttattttcatcgctgctttgtattttaataatacaatttggagttatgaatcttatgaacagttacaaagaaggtgtaaaggcaaaaactactacagtagaaaagatttatgaatcaagaagtcccaaattatttatcgagaaatttgaggtcatcaatgaaccaattatttataaaacgataaaagaaaacacaaataacggaacacgttatttacagatttattttctgtaccattttattcctaacagcaatacttactattctctgaagtttgaagaactttctgatacaaattttattcccgaagaaatgcaaatgggtatatttatgaacagaattaaatctgaaatgcaaaactatgattttcaaaaaataaaaacattcaaatatcttactataacagatcctgattatgatagctatggcaaagcagtatccgattattcaggggtttttctacaacctattaacaaaaaagatgatgaagatctgtttttgggagctaaaattatagtcgtaggatttttactctatttagtcatttttttactttccagagttgaggattggaaataaaattaaacaaacactcctgatttaaaataaacccacaaaaccaaagaaataaaaaaagacagtacagaaacactgaaaaaaagccactgaaaaacactcttgaaatagtatttttctaaagaatgtaaaacaaaaaataataaaaatgaaatggcaactccaataagtgaagcaacaattaatgtctgaacatatttttcagaagacaatggatctttgaatacgaaaaaaaataaaaccgccgaagaaaaaagaaataccgcacttactttttctgtaaaatacttttttggcttttcgtgataactaagatctgaagaagaattacttccaaacaattccaaagcatcgaatacaatgtctaaaatatccagaaaattccaattcatggcttgagtttttttgacaaaaatatattttttattacaaaaagattaatatagcccaaagtggctaataaagagtagtttacaagagtgggaaatccaatcggtaacgatttagtaatggtgcttactgcactcgctttcatctgattaccttgtaaatcaatactgcaaatataaaaaaataaagggtaaagtacataggtgctttaccctttttttctttcctctcatacaaaaattatgaaaaaaaattcccccactgtggggaacctgtgatatttattccagtatattttccaaattttggttcatcatcaatagatgtaattccgaaacagatagtgataacttttaaaagactaagctatggaaatcctgttgagtaaaatattatcgcaaataaggtatcaagaagataaactcgcttccgatttgatgccaacggcggaaaaggcgtatcaaatgaccttattcctgaatgaaatgcttcttaaagtaaaagccaagattgtgcaaagtgggtttaagaacgaacagcaggaaattaacttttttaagaacatcaaaccccaaatcttaggaaagctcatctactacaataaagtatttcgatttgaaacgacctgtccggtcagcacagggaaaatacatcagagttattacgagaatgaattaaaatctctcaaatcagaatataaggagagtatttgcaatacctatttttacaggtactaccgtgcaggaagaacagaccgtgaccacagctattttatgctcggaaaaattaattaccacgatggtttaaatagcggagtttttgaaatagaccttagcttttccacttattacgataacaaaatagcccatattattgccaatgaactactctatacttatttgctaaacaaaatcaatcccgaagaaaatcctgacttcgttttactaaatgacgatgtgaataaggatatttcgtggactaattcgcaaaacgcacttatcgaactgatatatgccctgtatgcttccagttctatctcacacggaagtatcggtatcagaaaactggctttgatttttcaaatcctgttccgaactcctgtaaatgatatacatcacgctttccacagaatgaaaacccgtgcaggttcccgaacggcatttttagaccagcttaaagtttcattggaagaatatatggataaagacctttgactattaaaaggcattggttcaaagcagtacatttatgtgtactgcttttttttacccatatctgccaattggcaaatgaaggcaaaataacgtagttaataattcaaaagccctcgaaacccttattaaacaagggtttttcccgattgcaaaaattttcaaaaaaccgtcaaaccaattggcagacattggcagacaaactttgccacccttagcaattttgcattgtgaacattaatagcaatgcaatgaaaataatcactatcgaagaagaagcgtggcaacagctcaacagccgtatcaatgcgattgccgattatctcaaaaggttaaatgatacaagctacgatgacttgtggctgaacaaccacgaggtatgccaatacctgcacatcagcgaaaagactttgtggcgtatgcgtaccaaaggcgaaatagcttattcaaaactttacgggcaatacttctatacgattggagcaatcaaggatatgctcaatgccaatgctatacaaagcaatgatgaatttgtacaggagcttatggcaaaaggcaaaagctatatcaagaaaggtagaaagctgaaatcaggtaaatcttaaaacgtgcggttatgaacattgacagaatggaatttttggcgtggatggaacgcctaatggaacgcctcgatatgctgggcgacaatatagacagcttacaaaagaaacgcaacagcattgacggagaggaattgctcgacaatcaggatttactgcaaatgctgaaaatcagcaaccgttccctgcaacggtatcgctccatcggcaagttgccctattacaccataagtggcaaactgtattacaaactgtctgacgtgcatcagttcatcagggaaagttttaatccgcctttacccaaactgaacgccaatggatgacaaacactgcctttgactgccatatcaggcaagtgagcaaacgcttcatatacattcggcatttgaactttaaaatattcagattatgagcgaagaaacagaaaacaaacagcaaactcccgaacagttatcggatatattactggtattggataagcaaaagaataaaatacaggcggttaccggcatagacgaaaacggcaaattgaagactactgaccccacaaaggaaaaccaaagccagtttatgcgtgtggataagcacggcgatttgttctccaacttcttctctaacttttggaggcagttaaaaaatccgaccaatttttcattcttcaaagtatcggctgatgaagccgtagataaggctaaggaaatgcaaaagcaggtagataatcctacacccgaaggcgaaaaggaaatgaaaaagaacgaggtaaaagccgaacccgaaaatgaacaaaaacaagaaaataaaaatgatatggcaacaacacagacaacaccggataccagcgaataccgctacaagccggaacagattgattgggaaacaatgaacaatctcggaataggcaaagaacgccttgaaaaaatgaaccttttagacccgttgctaagaggttacaagaccaatgaccttgtacctgtaagcgtaaacctcggcggggctattgttcgcacagatgcccgtttgtctttacagactgcaccggacggaaccgtagtggcagcgatacacggtatcaggaaagagcctaacctgaactttgagtttttcggacacaagtttaccgatgaggataagaaaaacctgctcgaaacggggaatatgggtcgtgtggttgacttgaccaattccaagacaggcgaattgatgccgtcaattatcagcgtggacaggctaaccaatgagctgattgccctgaagaccgaatttgtcaaaattcccgatgagattaagggtgtaaaattgaacgatgagcaaaaacaaaccttgatggaaggcaaatcgctttatttggaaggaatgatttctaaaaagggcgatgagtttagtgccaatgtacagtttaatgcggataaaagatatgttgagtttctgtttgatagaagtaacaataatcagcaaacacaagaaaaccggcagaacaatcagcaaagccaaccgcaggaagctccgagaacttttagaggtaaggaacttgatgatgaacaatacaataagttcaaagctggacaaactgtttatatagatggtctgatagataaaaaaggacaaaaatatcagggctacatcacgctcaacaaagaaactggcaaaacagatttctcgttccaaaatcccgacaagctcaaagcccaagcgaaaccaaccgaagcccacaaaacgcagactgcggttaattccgagggaaaaaccaacgaagcaaccaagaatatcaaagagcctttgaaatcggggcagcaaacacccaaaaatgaaaaacagcaggaacaacagaacaaacccaaagcacctgcaaaatccaaaggcgtaaaaagatagtgaataatgaaaacaattattgcagaaaaaccaagcgtagcaagggaaatagccggacttgtgggagcatccgataaaaaggacggctaccttacgggtaacggctattttgttacgtgggcattcggacatctgataggattgggaatgcccgaagattacggcatttcggggtttgacaaagcatccttgccgatacttccaaacccttttatgctgaccgttcgcaaagtcaaaaaagacaaaggctatcaagccgatgctggtgcattgaaacagctaaaagtgattgaaaaactgtttaaccaaagtgaaagcctcatcgtggcaaccgatgcaggtcgtgagggcgaactcatctttcggtacatttatgagtatctgaaatgctgtaagccctttaaacggctttggataagctcgctgaccgaaaaagccattaaacagggctttgacaacctaaaagacggaaaggaatttgacggattatatcaggcggcacaaggcagaagccgtgccgattggctcgtaggcatcaatgctacacaggcattgagcattgccgcaggcaacggtatttattcgctcggaagagtgcaaacgcctacactggctttgatttgcaaacggtatatagataacaagaatttcgccgtacagaaatattggcagatacaattatcccactccaaagagcaaattgattttaaaagtatttctgctaccaaatggcaggataaaaagctggcagatgatacattaaaatctattgaaaggaatggtaatactgtaacagttacttccgtagaaaataagaatataacggagcagccgcctttgctttttgacctcacaggcttgcaaaaggaagccaacaaaaagctgaacctctctgctgaaaaaactttgaatattgctcaaagcctgtacgaaaagaaattcattacctatccacgtaccgggagcaaatacatccccgaagatatgtgggctgaaattcccaacctcgtgagggcattgcagaacagggaaacctgcaaagctgctttatccaaaattaaatgggggcgtttcaataagcgtattgtaaatgatttgcgtgttaccgaccaccacggattgttgattacagataaagtcccgtccgttttgagtgcagacgaaaatgcggtgtatgatatgattgcctttcgcctgctcgaagccatttcgcaagcctgcatcaaagaaataaccgatgtttccttacaggcaatgcactatgatttcaccgtaaaaggctgtaaaattttggaagcaggctggcgtatgattaagggtaatttttcggaagatgatgcagaacctatacaggatttgcccgaattgaaaaaaggcgatgaacttaaaataaaagaagctgccattctcgaaaagaaaaccaaacctcctgtgctttataccgaagctgggcttttgtcggctatggaaaccgcaggtaaggaaatcgaaaacgaagaagaacggaaagccctgcaaaacatcggtatcggtactccggctacaagagccgccattatcgaaacactgtttacccgtaactatatccaacgagaaaaaaaatctttaataccaaccgaaaaaggattgcaggtttacgaattggttaaagaccgaaaaattgcggacgtggctatgaccgcagaatgggaactcgctttgcagaaaattgagaacaacgaagcgaatgccggaagttttcaaaaggaaacggaaacctttgcaaagtccattaccgatgaattgctgcaaacctccattgctcaaaacagcctccctaaattggtttgtccgaaatgtaaaagccaacagcttattatccgtgataagattgttaaatgctccgatgaagtttgcggctggatacagtttcgcaatgtgtgcgaagtgcaaatcagtatttccgatattgaaaaccttgtgaataaagggaaaaccaatcttatcaaaggaatgaaaagcaaggcaggaaagaaattcgatgcttatatcgtattggatgccgattgcaaaacctcttttgagtttgataataaaaagccaaaaagataatgaccgatattaccatatcccaaaaggaaatagcaccgcttatccataccattagggataagcaagttattcttgatgctgatttagcaatgctctatcaggtagaaacaaaagccctaaacagggttgtaaagagaaaccaaaaccgctttcccgaaactttttgctttcagcttagcgaacaggaagtaaaatctttgaagtaccaatttggcacttcaaacgttggacggggcgggaggcgtacgctaccctttgcattttgtgagcaaggagtggcaatgatgtccgcattgttgcgaagtgatatagcggtaaaggtcagcattgagattatgaatgcctttgtagaaatgcggaaaatgcttatcagcaatgcttcgctgtttcatcgtttgaataatatagaactgaaacaactacaagccgaccaaaaatttgaggaaatctttaaggcattggaaagcgacaagctccacagcgaaaatggcatcttctacaacggtcaggttttcgatgcttacgcctttgtgtcggatattgtacgaagtgccaaaagctccattatcctgctggataactacgtggacgatacagtgctgactttgctgggcaagcgcaaggaaaatgtaaccgctacaatctataccaaaactatcagcaatcagctacggctggatgtacaacggtacaacagccagtatgctccgattgaaattgaggttttctccgatgctcacgaccgctttttgattattgataatgcagaactataccacatcggggcatctctcaaagacctgggcaaaaaatggtttgccttttcgagaatggatattgaggtcggcaggatgctccaaattctaaacaatccataaaatgaacctctgaattttcagaggttttttattgctcattgcgacaaatcctgccacacaaagccaaaccctgccacttcttcaaaggcacttatctaccgctataattttaggcttcaagcaaaattctaaacaaaattatagtatgagtacacagcaaaaagacttgtcgtattacagattacgactacaagaacatcttaattcaggctttcctgaaaaagccagcgaccacaaatttatcgaccagcgttcttcgtgggctgccaatgcttacgagggtgctttcagttcgggaaacgctattgagcagtgcaacgaaatagccaattacattctctttgagggcttacatttttcaaggttcgataccatttttcaggtggtctgcaatgagttcgataccctaatggcagacgaggaacttcgaccatttgccctgaaaatgttccgtgtttgcgagcctgtttttgccaaatataaactgaccgatgatttcgcctacggttatgagtttgatgtactctacaccgaaataacgggaaccatcgcaatatggataaccgaaaatgggcttcagtaaaaagcaacatctccaacagaatattgatgccctgcgaattgcttttaaactggaaaaggagaaccgacaagccaccgtaggcgaaagactgctaatgatgcaatacagcggatttggcggtcttaaattcgttctgaaccccgttgaatatgagatggacatcaacaattggagaaagaccgaacacgaccttttctctattacgcaggagctgcatcaggttttaaaagaaaatgccacagacgaaaagcaatacaaacgatttgtggacagtatgcgaagctccgtactcacagcattctacacaccgccggaggttatagatgccgtttcttccgtattgcgtgatagcggtttgaagattgataaattcctcgaaccctccgcaggtatcggctcatttatacaatccttttcggaaaatcaaaaagccaatgttactgcttacgaaaaagatttgctaacgggcaaaatcctaaagcagctttatcccgcaaataatatccgcataagcggttttgaggaaatccccgaaaaggaacaaagcagttacgatgttgttgccagcaatatcccgttcggtgatacctctgtatttgacctttcatactcccgaagtagaaaccccgcaaaggagcaagctgcccgaagcattcataactatttctttttgaaaggaaatgatatgctccgagaaggtggtttgcaggctttcattacctcacaggggattttgaacagcccgaataatgagccgatacgcagggcattaatggaaaacaacaatttggtttcagctatccgcttacccaacaatctgtttacagattatgcaggtacagaggttggctctgacctgataatcctgcaaaagaatacagcaaaaccaaatttgaccgaagcggaagaattgttttgccaaagcaacaaaacaggatatggtacacccagcaatgctttatttgaggacggtacaagaattatacatacgcattggaaagtagatactgacccttacgggcaacctgcattaatctatacacacaaagacggcgttgagggcattgcaaatgccctcaaagagatgctttccgaagattttggtaaccacctgaatttgtctttatacaaaggcgaacaacacgatgaaccttttatacaaattccaacgccggtaattccgcctcccattgttgagcgtgaaatcattcagccccagcaacagctttttacgacacctgtgataagacaggaaagtccgcaggaattaaaacagctaagcattttcgacctatttgaaaatacaggtgaaactgtggctgtccttgctccgccaaaaaaagcaacatcagccaaaagacagaccagccagagaaaacgaatgcctatcagtcgccagcccgacctgttcagttctgcaatgcagcaaccttacacgcttcctgtttcaaatggcaataaaacatttaatggcaaagaacaggaagtaatcggcgatttgttttcgcaacaaaacgggaatggccaagctgataagccagccattcccgtagccgttcttgccgccattcccgaacctgcgccgtttagtaacgaactgcaatcgttccaccgaaacgattgccttgtggtagataatggctgggtgggttatctgcaaagtgtagataccgcagacggtacggctgtcttccacccgttgcaattacctcctacgcaaaaagcaagagccgaagcgtatatacaggtacgtgatgtttaccaacagctttataccaaagaagcacagcaccaaactgaacacaaagaagaaagggaaaaccttaaccgattgtacgatgcctttatcaaaaggtatggcaatctgaatagcgccgataatatcaagctcattaaaacggacagtgccggaaaggaaatgccttatctggagcgtgtggtgggcggcgtggtacacaaagcggatatattcagccgtccggtcagcttttccatcacaacattagctaccgacaatcccgatgaagcgttggcggcatcgctgaacaaatacggaagtgtggatttggactatatgtccgaagtgagcaatatgactgccgatgtgctgaaagaagccttacacggcaggattttctataaccctttgcaacaggaatatgaaatcgccgaacgctggattgcaggtaacgtggtagaaaaagcggcggatgtaagaaactacctcgaaaacaatcccgatgatgcccaagccaaagaaagccttactgctttggaagaagcccgcccaagacgaattgaatttgaagagctggactttaacctcggcgaacgctggataccgactggcgtttatgcccgttttgcttcgcatcttttcgatacggatgtgcgtgtacattattccgaaagctccgatgacttttctgtaacctgtggacagaagaatgtgcatatatgggacaaatatgctgttaaggcagagagcagaacgtttgacgggattaacctgctgaggcacgcccttgtcaatactacgcctgatattaccaagaaaatcacaatagatgataaggaagtaaaggttagggatatggaagccattcaaatggcaaacaccaagattgacgaaatccgaactgcctttacagagtggctccacgcccaaaacaatgagtttaaaaacaggctgaccgaccaatacaatgatacctttaactgtttcgtccgaccgaattataacggaacacatcaggagtttccgggattagaccgcaaggggttaaaaatccaagacctgtatgatagccaaaaggacaccgtttggatgattaagctcaacaacggtgctatctgcgaccacgaagtaggtgcaggaaaaacgctggtaatgtgtacggcagcacaggaaatgaagcggttggggctggctcacaaaccaatgattatcgggctgaaagcgaacgtacccgaaattgccgaagcatatagaaccgcctatccgcacgctaaaatactctatccgggcattgacgattttacgcctaaaaaacgcttgcggatttttggtgatattaaaaacaacgattgggattgcgtgatactcacacacgaccaattttctatgataccgcaatcgcccgaaatgcaaaaggaaattctcgaaatagaactggacagtgtggagcgtaacctcgatgtgctgcaatcgcaaggaaatgaagttaccagagggatgcttgccggagcgataaagcaaaaagaaaatctcgaagtaaagctgaaaaccctgcaacacgatattgagaaccgtaaagatgatgtggtggacttcaaaatgatgggcatagaccatttgtttgtggatgaaagccaccagtttaaaaacctcatttttaatacacgccattcaagggttgccggattgggaaatatggacggaagcctaaaggctttgaacctgctctttgccattcgcactatccaagaccgtattgatgcggatatgggtgctacttttctttcgggtacaaccatcagcaattcactgacagagttgtatctgctgtttaaatacctacgcccaagagcattggcaaagcaaggcattcattcttttgatgcgtgggcggctatttacgcccgtaagaccaccgattatgaattttcggtggctaataatatcgtggcgaaagaacgtttccgctattttatcaaagtaccggaactggctcaattctattccgaaatcacggattaccgtacagcgaaagatattggaattgaccgccccgaaaagaatgaggtgttatacaacataccgccaactcccgaccaggaagcatttatccaaagcctgatgcagtttgccaaaacgggcaatgccactttattaggaagagagccgctttctcaacgggaagaaaaagcaaaaatgctgattgctacggactacgcccgtaaaatgtcgttggatatgcgaatggtaagcgatatttatgaagaccaccccgacaacaaggcttctcattgtgccgctaacattgcgaagtattaccaccaatacaatgcgcaaaaaggaacgcagttcattttctcggatttaggtacttataaaccgggtgaatggaatgtatattctgaaattaaacgcaagctcgtggaagaccacaacatacctccacacgaagtccggtttatacaggaagctaagaatgataagcagcgtaaggaacttatcaaaggaatgaacgagggcaaaatccgtgtgctgttcggttcaacaagtatgctcggcactggcgtaaacgcacagaaaagagccgttgccgtacaccatttggatacaccgtggcgaccgagcgaccttgcccaaagggacgggcgggctatccgaaaaggcaatgaaattgcaaagcattttgcggacaacaaagtacaagtaattatctatgccgtagaaaaatcactggacagctataagttcaacctgctattcaacaaacagctttttatcgaccagctaaagaataataatctcggtaagcgtacccttgacgagggtagtatggacgaaaaatcgggtatgaacttctcggaatatgtagcaattctctcaggaaataccgacttgctggataaagccaaaatagaaaagcagattgccggactggaaagcgaaaagcaggcttacagtcgttctaaatacagtgccaaatataaattggaagactatacagccgaacttgacaaagcccaatcacgctttgaccgtatgagccttgattggggaaacttagagcaacggttacaaaaacggcaggacggtacggttgtaaatgctcttgtgctggacggtttatcgccgaatgccgatgtaaaacagacgggtgcaaaacttaaccagcttgcggacaaagcacgtacaggaggcgattatgaagaaatcggtagcctgtatggttttcagctattggtaaaaaccgaagtttcccaaaaagagggcgtggatattcgtgtgaaccgattttttgtacagggcgagggcaatatcaaatacacgttcaataacggtgttatggcaaaagaccccgaaacggcatcactgaattttttaagggctttggaaaagctgcctgtctatattaaaaaggaacaggagaatattgccgagttccaaaaagatttgcctgtgcttcaggaagtggttaacggtacgtggtctaaagaaacccgtttaagcgaacttaaaactgaactggctgccgtagaaaggaaaatacagctttccatagaacctgttaaacaagtagaagaacctgcggaacaaactgaaaaaaagcagcaagctccaaaggtgtcagaaagcattatcagaactaaaggtatccatttgccacgaggcgtactatgaaaagaaaacggggatctgcaagtccccgttccttttttatcaatttctaatattcatcttcttccagctcatccatccgttttatcagcgcatcacgcaggctgtcaagaaacttcgtccggtttatttttcgggctttcagctccataaatgtatggtaaaagtcgcctaaatcaacattaaagatgctttcaaatgttttggcgattactttaatatccgtattgtcaaatacaccctgagcgtgaagggcatatatcaattctgtcaatgcagttttactgcctcgccaatttaagttaggtaattctattgatttgcttttatgtatcgggctgtgaagctggtcttcaagatatacttgtatcaggtcattggcgatgatttttgcagccttataatcgtgggaagtggaaaaattatggtccgcttcaaaataataggtgtccagacttagtttaatgtcatactttccccgtacaaatagcttatcatctataaaagtattattggttctgtaatatttataaaattcgaggttattgtcaaaatatcttttgagtttttccaattcatcattatagtatttcttcactgccttaccgccataaggtttctttgtttcgattttatagatagcgttataatagatgagctttgaaacaatagcgggcttttgatgcttgaaaaaacgaatttcttcctctacatttttaaatcctctgttcaatacatattctttcacattagacaggcatttgatgataagttttattatcacttcaatctgttgtatggagcaatccgtttcagtttctaattctttgattgcggcttccagattattcaacgtttcgttataaaatttatccatcctgtttattttgaaatttctattggacacctacattgaattagttgatgtcattacatagggttagctaatcggtcaaagtgcctttttacgatttcctttcgatgatttaaaggttaaaacagcaattaccgccaaagccaacgtaagcatacctccatacaagaactctttttcgggaaaccgtgtgcctaaaaaacctgctatcgggtatgctattgcccaccacaaatgagaaaacgcaaagtgagaaccgtacaccttaccttgattttctgatgcaatgttttcgcctattaatgtttctgacggcatatcggcaagcgtttgacctatacctgccaaaacccataagaacagcaagccgttgtacggaacaaaattggcaaagctgatagctaaacctatcaggacagccccgcttatcagcgatatgctccgtgttttggttttatcaaggctgcctaacagaaaagccgtgatagctgcgcctactccgaaaattgccattatccagccgtaatgcttatcatctaaagctaaagatgtttttaccaaaccaacggtatttaccaataccatagctccggcaatagcagatataaattcaatacttaaagagaaccttaaaatcttgtttccaaacaataagcgaataccttttattacttcgctccacgtattgccgggcggtgtactatcggtattcactcctttttgcagtgctgccaccggtatagtcaatatcagtagtatggcaatgaataatgttgctccattgacaaagaaaatctgcttggctcctaaccataccgcaaatatccccgccaatgcaggaccaaatacgcttaacaactgaaaagttgccattgataagccgttggcttccctgtatatttctttgtctactatctgtgggataatagccctgtatgttggcgtgaagaatgcagcgaatacgttcaatgcaaatatcaacccatacacctgccactcggcatttacaaacggcagcatacacacaattgccattcttgccagttgcgttatcagcaatatgttttttcgctttaatttttcagacactacgcctgcaaagggcgaaaaaatgatatacgccgttacccgcaaagtgagagccgatgccaatatagctgccgcattatcggggctgatttcataggtaagcaatgccaatcctaaccacgtaaaggcatccccgaacaaacttgcgatttgggcaaaataaagccttgcgaaagtcgagttccgtaatgttttaaatggttctgtaaacgctttttttaataattgtaattccattttacatttttaaattattcttattaagcggataagcaccgccgtcagacggtgcttttttctatccgcttcgttatggtttcttaaaaattcattatcagtttcacactgatattacgtcccatattgaaaacgcccattcttcccgttgccggattttcaggagcatatttcagtctgcttaaatgactttgataagccacatcagcaagattttctccactaatgaacaaagacataaagtcgctccggttgaacgccttaatatttgttccgatacctgcactcaataaagtgtatgcgggtgttgctgtttctgttccgtaagcactgaaaaacttatcctgctgaaagaagtggttaatcccaaatttgatgtaagcgttggaaaacgttctatttacattccttaattcggctttgatttcgcccctgtatctcggggctgggataaacggcaagtatttcgagctttcgggttggctgctttgggtagcctgtacatacgaaaatgagttttccaaatgcagccattctatcggttgcgggtgtatgtccaaataaatttcgccaccaactaaggtagcgttgcccgctgtatattgaaaggctggcgcaccatcaacagggtcgggaataatttccgttccgtcttccgcaacaagtttttcgagatagatataattttgaatgaagtttacaaatggcgtaagctccaacgtaatgtgtttggagttcagaaaataggcaacatctatctggtgactgatttctgattttaaatcaggtgttccgaacagataacgaaacgttccctcgtgtcttccgttcgctgacagttccgtactgttcggcgctctgaaacctctcgatacattgaattttaacgtagaatttttatcgacttgataagacaatcctaagctaccggaaacgccattgtagtttttattaaaggcactgaactttaattccgcatcggggtctgtactttgcacaggctcttcgtcttcattaagatagagttcttttgagttcatagacctgttgtcaaatctaagtcctccggctaaagtgagtttgccaaaagttttctgtgtaaaaagaaatgctccggcatcaaacagattataggcaggtatcaaaaattcttcccctctgttggtgttggattgccacataccaccgataccaaccgaagtttcccagcctcttgatttttcaaaattataccgcacattataattaagtgtgttcaaatcaaagaacaatgccggttcattgggagcggcggggttttcatactctcttcgtttattgttctgaaaaccgaaatcggcattaattgtacctttattcaatatgaaataattgttggaagaaacgcccaaatggttgatggtctgatgtggaaaaccgaccttataccctttataatcatttccgcttgcaactacttcatcgccattggcattttcatagataaatcttcctaactcgtccctttcgccctctacaagattaagcgtgttgttataagagctgacggtgaggtgcgagtgtccccaccttttgtttattcccaagaacaagctgccgttaagttccttaaaacccgaattgaagactttcccatcgtaggcattttgatagttgcccgcaaatttattactaaacctgcccaaccattgtaaaccatccttattgcctgcattggaaagggagtagcctatcaggttattattgctttggtaattcgtagaaacctgcgtttttatctcacctattggcaaggctttaggagcaagaaagttaagcactccggcaataccgtccgagccgtacatcaggctgccgggacctttcactacttccactctgtccaccgcattctcatctatttcaataccgtgttcatctccccattgctgcccttcttgacgaataccgttattcaatgtaatcaccctgttgtatcccaatcctcttatggtaggttttgaaattcccgtacccgttgttatctggtttacgcccggtatgtttctcaaaccgtcaatcaggttggtagcactgttttgttttaaggtgttgccgtcaaccgctttgacaataacagggcttaatcttagttctgtcgagcgggttacacctgtgatgattaactcgttcagctccgtaatggcaggacttaatacaaagtccataaccgtatcttgtgctatcgttattttctcgattattggttcataacctgtaaaacttatctctaaaagatatgttccccgtttcaggtttttgatttcataattaccgtttacatccgttgtggttccggcttttaaatcagcaatatagactgataccccggctaaatttttattattttcctggtcttttactgtaccggaaattctgttttgtgcaaatatgtttaaggttgctgaaacaaaggcaaccaatagcaatacgctttttaaattcataaatctgattttttaattcttataatttgagctggataaacagacgctccggctgcttacctctataaaaaatcaaattattggcggacctctgttttgggtttcaggaagtgtggcttcgtaaaaatttgccttatataatgtatattccgaacgatgttcaacattaatgcaaacaaactgtatagcggtaaaaagatgaacagatacacaatgattgtcacaaagaaaacacttctttaatactttgctaaggtgggctttatgttcgcagaaactattgctgccatctgaatagtaaacagttttttcacatttggttgctttttcaaatgcaataatttcatcgtggtggtgaaacataagtgcagggctgttgccgaacaggtataacagcaacagaaaaagtcctgcaaattttatgtttcttttatctttcaattttagctacgatatggttaaaaatgttttggattttcctgtaaactcaacgggtatctaccaaagacaatcctgaaaatcggttgccatatgtaacaataagcccagcgcaacaatcctgactattttgttgccgaacagcaagagcaagaaatacactgctattgcataatacgaatgcaggtagtgaaagccaacgctgcatctgttcgggtcgaatatcggttctgcaaacaggtggtctatatcaacaagcattgttgctaacaaaattatccagaccatcttccattcctttctgaaaaacacgaaggcaaccaatcccggaaagagaaggtgcaaagcgtagtggataatattttgcagtacgaataaggacatttagttatttttctttggtcgttttttagtcgggtatgaagcctattaatagtttatgttgatttgttatggaaataaagccttgcggaagtcttattccacaaagccttattatttcaccgccaattttagatgaaaaattagtgttgatgtccgtgtgctttgtcagcagcagaaacctcatttttaaattttccaaccaactttttgccctcataggtaatcgtaacggtgcaattcgtatggatgccatttttaggcaatgccactgtcaatgctccatttttacctgcgataagattagctgttgatttactgccattttcaaaagcaaattctaccgagccggtagccgttttggttaacgttttagcattggcatccagcacataaaaagtaagcgcattgttggcttttaccatttcgatatggtagttgtcaatatctaccattttacccccgtgtggagctgcaccgtgtccgctttgagccattgcagggctaattgctaaagttgcaatagcaaccactaaagccattccgattgatttgatttttctcattttttttgatttttaaaaagtgaataattaagaattaaatttttaccctaagtaatttgattgaattaagaaacaccagcgtatcaggtaacaggtggatgatggctgcctgcaccggtcctaaaactcccgttaacaccaatgtgatacctacaacgtgtaccacacccacaccgccgatgatattttccttaattgtcctgaatgcttttttactgatggctttggaacgggctattttttccagcttatcttccaccaatacaatatcagccgcttccattgcagcttgtgtacccactatgcccatagaaatacctacattcgcctgtaccaaagcaggtgcatcgttaatgccgtcaccaaccattgctactttttcgcctttggattgtagttcctgtatcgccttgattttgtcttcaggcagcatatctgccctgaatgatgtaatacctaattgtcctgatacgtgtgctgccgtctgtggattgtcgcctgtgagcataatgatgttttctacaccgcttcttttcaattcctcaatcatttcctttgctcccggacgtatcgcatctgacacataaaacacagatgccgcattgccatccaccgccatatagatagccgtatcggtgaggttttcgctattgacggttacggaaatagtatggtcgtccatcagcgttttgttacctatcagcacttttttattgttgatggtagcactgatacctttccctttgaatacctcaaaatccgtaggctctgataacgaagcacccatattgtccgcatacatcagtatagcattggcaagggggtggctggaacggttttccgctgatgccgctaattgcaccaattctttttcagtaaagctgtcatcgagtatttcaactctgtttacggtaggcttacctatggtcaatgtgcctgttttgtcaaaaacaatggtttttatcttcgccaattcttccaaaaacttaccgccttttacaagtattccttctcttgcggctcttgctatggcagaaatggttactaaaggcgtagctaagcctaattcggcaggcgaagtgaaaataagcagggctatcacgagctttacatctttagttagtaggtaaacacccaatacaaaaacgaaaacaacgggtatcagccacgccgctaccttatccgttaatttttcaataggggctttactgctttctgcttcttctaccaaagcgataatgcgtgaaaacaccgtatcttttcccgctttggtcatttctacgtccaaagcccctaactccagtattgtacctgcaaatacttctgtaccggaatttttttctacgggtacgctttctcctgttatgggggcttggtttacagaccccgaacccgccactatcttaccgtcaacgggtattttttcgccagcctttaccaccacaatatcacccaccgtcagtgatgcaatagatacgggctgctcgttaccgtcctttttcaatatggctgtctgtggcacagaaccgatgagttcctttatagatgctcttgctctttcaccgcttgcactggcaatgtattcggcaatcaggataatcatcagcaccacagaacccgctaaatattctttaccaacgaccgatacgattacggcaatggaaataaataactccgtacctattttccgttccctgattaattcgagaatggcagtttttagcaatgcgtataaaccaaaagccgtagctgccagcaagacgggaagtggtataatttctaaataaaacaacaggctggcaatacccactgtaataatgcgtatgatttcccaaaaaaattgccgggaaaaaaaggtttgtaaatagttcatattgttatgatattaatgggtatgccctttggatatacccaagtttgaaataactaccgataatatgagcaatgctataaacaatactaccccaagggcaatcaaaccatacttcatctttttagataggggtctgttatttgtacctccttttcttttcggaggaggtacaaattttttcctctttcttgttttccgacttctatttgttcttgatttcatacagtagatagcattgtcttattcttcctcttcagcgtttttaattgccgaaagaatggtataagcatttttagtaactacctttaatgattgctgattaacactttgaggcaattcgatagccgtatagccttcctgttccatacctttggcaacttgtaccaactggaaggtatagccgtctttactatccgctgtttgaataatgatgtaatccaaaccgtccaactgaacaatggcatcattcggtactgcactcttttgttccgttcctgtttctacccacgcctttacatacattcccggtaaaagttttgcatctttggtaaagcggcaaagcacaggtatcatttttttgtcatcggctgcctgacctaccaagtacacttttgctgtgtggcggtaatcattctcattagataatgaaaacttaaccgtttgcccaacctgaatttttcccaagtctttttcaaaggcatttaaggcaagatgcagggcatctgtacctgttatctcaaacagcacatcggtaggggcagcatatttaccaatgttggtattgctgcttttgatataacctgaaatgggtgcataaatgcccgcagttctggaaattttattgctgctttttaaacttgcgctgctgatgccaatgagtgccatttgctgttctaatccggcaatacgggctttcattacattataatctgaacttacctgttgaaaagtctttgctgcattcacatcctcgtttctcaattcctgctgccttttgtattcctgcgataaatattccaacctgccgatactttccagatattcctgctgaatggtaataaattccgggttttcaatggtggctaattgctgtcctttttttacagcttgccccggtagcagccctgctgtttttatataacctcccaatggtgctgacactgtggctatactgttagggtcagcttcgatagctcccgtcagcttgatgatattacttaggtttcttaattcgatagcacctgtttgtatctctgatagcttatactggtcaggagtaaacgtaatttgtctgaccgaagaagctgtgtccgccttgctttctgcggtagtctgctccccggcagcttgctcttttttatccttacaggatactaccactattgctgatagcagtaggagcggtatatattttttaaatgacctattcattattttaatttttttgaatgattaatttttacctgaaattgcttctatggaaataacgaccctgttgaaattatacaggttgtctatatactccgaatggatgttattggatagcgtaaggttttgcaaatattgtgtataggaaatatcaccgcttctaaaacctttatccgagttgttgataatcaggtctgcctgcggcaatgcctgtgtctgataatagtttattgacttctgatatttcacatactcctgcgccagctcttttaattgtccgttcaggttcatcgttgtcagttccacctgtttttgtgcaatctgctcgttgattttagccgcattgattttggatttataacctccggggaaaagaggaatagcaacaccaatctggaaaaaattaaaccggtcttttccggtataggttctgtctataccgtttattgtttgcaagcctttgtaggtttgaccgttataacctaaaataatatccggtagcatcttgcttctctccaaagagatttctctttggcttacattgatttcctgttgcagatattgaatgatgggattattggcagtagatgcgttatccataggcaataatatatctcttggaactaatgcggtatctgctatactgatatcatcggttgtgttgagcaatgtctgtaaaagctgcttggcaatttttatatcggcttcgttcttttccagctcattttgaatttgccggtactgtacagatgaagtagcattttcaaggcttgtactttctcctgtccggtatctcacgtcgcttgctttgcttagcttactaaaaatggtgtcctgctctaacaacagcttccttttttccaaaatgtactggtattgcaggtaagccagcttcacgtcttctacaaggtcgttttcggtcacagctttgtatttttcgctgctttgtattctttcctgcgccagctttgactggttgccgtaaaccgttggaaaatcaaaacgctgtgtaacactgattaaattatcattaatggtaggattactcactacgccctgcgtataggaaatttctgtcttaggaatagtaacgcttcctttttttaaagcctgctggacattgatgttatactccgctatcttgatgctgttgttgttttttaacgcctcgtcaatagattgctgcaaggtcagcactctcgttcccgaattggatggtacttgcgcctgcattacagatgggaaacagaaaaatcccaatagcaatatggcggtaggtaaggctttgtttttacgcattttgaaagatgatttagtgaagtagatatacagtaccggcagcactacaagggttaaagcggttgccgttatcagccctccaataactaccgtagccaacgggcgttgtacttctgcacctgatgagctggacaaagccattggtaaaaagcctaaagaggctacggcggctgtcatcaatacaggtcttaaccttacccgagtgccaatacgcaccctttcgtaaatatcttctacaccgtcttttgccaatcggttaaattccgctatcaatacaatcccgttcagaaccgcaaccccaaacaacgcaataaaacctacacctgcagaaatactgaaaggcatatccctgataagtagagcaaatacaccgcctattgcagacaatggaatagctgtgaatattaataagccctgctttaccgaacggaatgtaaagtataaaagcaataggatgagcaatagtgcgacaggcaaagctactgccagccttgcgttggcttcttcgagatttttaaattgcccgccataggtgatataatagcctgatggcatcttaaccttagcattcacaatatcctgaatatcgtttacgatgctttttacatctcggtttcttacgttgaaaccaagtgtaatccgtcttttcgcattatctcgctgtatttgtaccggaccgggtttgtaagcaatattcgccacctcgcttaaagggatttgctgacctgtgggcgtacttacaaatagattttgaacatctgtaatgtctgctcttgaagcattatccaatcgtactaccaaatcaaaacgtctttctccctcgtacaccaaacctgctgctttaccggcaaagcctgtttcgatggcactgttcacgtcctcaacgttcattccgtattgggctatcttatctcggtcaaactgtatgctgatttgtggtaaacccgtaatttcttccacatacaaatcttctacaccctcaacatttcttattttccgacctacatctgaagcaaggtcagaaagcacatctaaatcttcaccgtatatttttaaaaccacatcctgcttagcaccggtaagcaattcgttaaaacgcatctgtatgggttgctggaaactgaatgttgcattggggattacagatagagattgttgcattttttcaatcagttcttctctgtcgcctgcacttgtccattcttttttaggctttagcttaacaaccatatctcccgcttcaataggcattgggtctgtcggaatttcacccgaacctattttgtttactacctgttctacttcgggatagttcttcaataaaatggtttgtgctttttgggaaacgtctatcatttgggtgatggagcttcccacgggaacccttgtttccactgcaaaatcgccctcgtccaactgcgggataaattcaccgcccattctgttgaatgtgataagtgtgatgatgaacaataccactgcaaccgatactaccaaaagttttcgcttcatcgcaccattaatgataggtgtataaactttctgtatggctttcatcatcctgtccgaaaagttttctttgtgcgttgtctttttactcaacaccaatgcagacatcatcggaacgtaagtgaacgataacaggaatgcgcctaaaatggcaaaagaaactgtttgtgccattggtccaaacattttaccctcaacgcctaccaatgctaataaaggcaggtacacgattaagataataatctcgccaaatgctgctgcggaacgtatcttacgggacgactgataaacttcttcgtccatttggtcttgtgtcagtttagccacgccaccgtaccgttccttgctacctgtaatcctatgcaacaccgcctcaactataatgaccgttccgtcaacgattatcccgaagtcaattgcccccaagctcatcaggtttcctgaaactccaaaaacccgcatcattgctattgcaaacaacattgccagtggaattacagaagccactaccaatccgcctcgcaggtttcctaagaaaagtatcaatacaaaaattacaattaatgccccttcaataaggttggttgaaacggttgaaatagctccgtccaccaattttttacggtcgaggaaaggctctatttctacaccttcgggtaaacctttctgaatttccgcaatcttttcttttacattggtaataacctccgatgagttagctcctttcaacatcataacgatacctgtaacggtttcgccctcaccgttacgtgtggctgctccgtatcttggaccgttgccaaaacgaacttcggctacatctcttaacaaaacgggtacgcctccctcggtttttataacaatttttttgatttcctcaatgttctttaccaagccttcgcttcggataaagaaagcattcggacctttatcaatatatgcacctcccgtattttggttgtttttttccagtgctgtgaaaatatcggagatattaatgttctggctggcaagcctgtcaggttcaatggcgatttcgtattgctttacaaaccctccgaagccacttacttccgccacgccgggcgtacctaatagctgccgtttaataatccagtcctgaatggttcttaactctgtggcatcgtacttatcttcatagccttttttgggatggataacgtattggtagatttcgcccaaaccggtggttacaggagccatttcaggcgtacccaccccttcggggatatttttagctgcaatagtcagcctttcctgtacctgttgcctgccccaatagatgtctaccttttcttcaaatacaatggtaacaatagaaagcccaaaacgggaaaaggaacgcatatcctttatacccggaatgctgaccattgtctgctccacgggaaaggttacgagctgttccacttcctgcgccgccagtgtaggcgatacagtaatgaccatcacctgattatccgtgatgtcaggtgtggcatcaataggaagtttggtaagcgaataggaaccccagcaaattaatgccagggtaaataatcctattaccaacttattcttgattgaaaaatgaatgatgttatttaacatatcataatgttattagaatatttattgtttaagaagatactgtcctttcattttgattttaacagtaatgttctcattggaattgtttttgaaataccagccctgcggaccttcaaacggagcgactaaagagccgaccatattattggaataggcaatagtatagctttcaaagtagttgctgttgttctttacttcgccgtgaaagtcaaagtatagctcacctttatcggtaatccattcatatttcatctgaccgtatttcaacatatttactttgtattccaatccttcgcctgccggaataaccacgcttacctcgtctgtacgttctgccagttgagtggctggtggcgggttatctgccgccgctggtttggcaacatctgccggagagccaacattttccagttttagtatcttgtgcggtcccgaagccaacgcttccgtacctgcatcaccaacatacagcttgctaaagcctgttgccttgccaatacccaaagggtctatcccgtattcagccgggagtacggcacttaccaagagtaccgctccaataaccaaagcaataatgacctgctttacaatggatttcttatctaagatttgatgtgctatttctgccattttgatatttgttaagagttaaaataaccgactaactgatagccgaataataaaaagcctgctgccatcagcaacatatttgtaactgttgagaattttagaaaactcggtgaccttctccaattagtgatgataaacaatacaagggctaaggctatgaactgacctatctctacaccgatattgaagccaagcaggttggtcaataagccggttcggtcaaagctcaattcctgtaacttactggctaaaccaaacccgtgaaaaagtccaaagattaagactgccgctttggtattgggctgacgtcctaaaaacctttgaaagcctcctaaattatcgaagcctttatacacgatagacaatgcaataatggcatcaatcagataggcattgattgccatatctgccaatacacccagcaatagggtaatactgtgaccaatggtaaaaaaactcacataaagcagtacttcttttgggcgatacagaaaaaagataacgcctacaagaaagagcaggtggtcatacccggtgagcatatgctttgccccgatatacagaaaaggaacgaaagctactcccgaattgccgcttaaaaatgtctgggtatcctcatctactccgtgagcatacgccgcccctgaaaccaatatcagtagggctattgatagaaaaattttgatatacttcatttccggattttttgttaattgaaagcatagcatcgaggatgtgcataggtgaatacacacatctcacgatgtacagtttgtgaaatcaattatgcacacggattaagcgtaatccccaaaaggattaatgcttgtgtccgtgagctttgtctatgctgtcctgattaactttaggctgcgcagcagatttatctgtgctgtcagcaggtgtatgattacccgcagggtcgtgggaatgaccgtgagccttgtcaatgctgtcctgattgactgccggagctgttagttcctgttctgaatttgaattatccgaagaagatttttcgctgttattgcaagctgtaaacgcaagtgcagcaaatgccgctataatgaatgattttttcatcgttaaaataaatttgatattaaaaaagaaataattcgcccgtaggattgggcgtaactcaaattttaactttcagagaatgaaagttaagcaacgatgaaagagggaggtccccgaagggtgtatgctccgaggagcggtggtaaataaataaagtgtccatcaggtggaaacgtgtgtttctgatagacaactatatattcaacaggcggaatgaaatcaatcggtaaagccttgattgattttacatcatcctttgaaataacaattctggtttcgcttgaattagtaaaagatacgtgttcgccagcgtgtataaaacccgaaaaggcaagctctaaaggtgtttctttactattgttatgatgattgttgccattctgatgcccgtcattggcaatatctgcgtggtggtggtgcgatacaatgccgtgccccaaaataactaattgggcagcaattaaaaacaatatggcaatatatttacgcaacattatggcaaagatatacaaataagttcatttggtaataattcggtgcaaaaaaatgaatttagcccccaataaaatattacaatggcagatgcttaaatttaaaaagccttttacacaggctcaacaggaatatggattgctctctccatattttcgtaaggatttgtcagcgggctttgcggtaaaatctcaaatgcaaaaggttgtttaatcctgtaagggctttgatgcagccattcgtataagctgtgaaaagtatggaatatttgttttgtatcgcctgtaatgccacatacggcaaactttccgccgtcaatgtttagtatatcaatgcctttgggtatctcctgatgtgcctgtaacgttattcctgcctgatatatgcctgcgtgtggattgacaatgccgacaaattgcgtgttcacagtcagtaaatcccttgcctctgcaaactgaataactcttttgaaactcttatgaatttctccgatgtctgttaaaggtgcatttacaaaaatgactttaagcgattgggctttttttatttcaatgctcaaatccttttccctgccgttattatcatttacgaaaaagttcccattgatttttatatgcttcaggtactttgtaatagtcgtgtggtcttttgacggaatgttccgcaattcctctgccgaaataccaaagaaattcctaaagctccttgcaaatgtagaagatgaagcaaaaccgttatccagtgcaatttcggtaatggatttgtgcgtatgtgtgagcaaataatgggcaacatttatcattcttacctttatgataaactgtttcgggctttcgccagttacctgcttaaatattttttggaaatgaaaaggcgaataattagcgatgcccgcaagttgtgctaacgaaagctcctcttgcgggttttgctgaatgaagttgataactgcattgattttctttttatgttccgttgaaatatcaaacatcgcttacaaaggtaatcaaaatacaggctaatggtttgagtgctgctccattccgttgtggtgtggcggtgtatgatgccctgaatgaaaatgatgaataatgccgtgaacaatggttgcaacaaggatgaggtgaagcatcacaagaacgactttactgaaatggcgataccattttccaagcgaatgcctgtctatgtaaatcctcaaaaaaacggctgcaatcaacgtcaataattcaaaggtcaaaagacctgctaaatgtaagtgaaacataattttatatgtaagctgattaaattaaaaaaagcaaagagcaaccttatattgttactctttgctgtaactgcgttcatcattttttaacaacaagtttttcagttgcggcattaaactcaatcgcctttttgttgctttcggcaactctcgattgtttgccgtgaatgatttttcccaaagggcaaataccgtcagcaggtggttggtgtcctacgtgcaatgccgctccaagtgtaagaacagaagccgcacttaacattacaattttacctttcatattattttcgacagtgattatagtgctgtccccgcacttctaataatttactaaggcaaagattgaatgtttacattgcatacactttacaaaacgagggaagtagtttgcatttcttgcgattgttgccaaaacatttaaagaactttcactattcggctattgttcctgcaccaaatgctgtaagttcgggtcgttcttgatacgctccatttcgctgactacaatattcagtatatcagattttatctgtttgtaattgctttcaatttcctgcttcattttatcctcgccctgctcatttacaaaagataagatttgcggtatcttttgataggctttgctttctgctgctaccttttcattatctaccacaatttcggcgtgaaaaatcttttgctcgatacgttcatcaaagttatctgatacagaaccgacaaacatcccttgcgttaaagttgagattttggaagcgggaataaggctgtctaactgtgtggagatagaggtagatttatcgttgcggttaatcgtcatactttggcgtttctgcaacactttaccaaagcgttctgataggctctttgccgtttctccaaccacctgaccactaaaaatattgcctacggtattctgtattaccttgctttctttatcgccgtaatccctcgtcaattgcgaaaaatcctgaaagcccaagcaaaccgctaccttattacttctcgccgttgcgataagattgtccagtccccgaaaataaatggtgggcaattcgtctatgataaccgaacttttaagctgtccttttttgttgatgagctttacaattcttgaattgtataagcccaatgctgcggagtagatattttgacggtcggggttattgcctacacataaaattttcggctctttcggattgttgatgtcgagcgtgaaatcatcgcctgtcatcacccaataaaggctcggcgaaatcattcttgataaaggaatttttgccgatgcaatttgtccctgtaactggtcttgtgcgccgccttgccacgcatccataaagggcgacaaataattttccaaatcggggtaagaggttaaaatcgtgaacacgtccgaatactttttattcagcaattcaatggcgtgtgggaacgtacaatacttaccattctcgtagattttcagataccaaataatggcagccaataagataattgggctttctacgaagaaatcgccctgcttctgtatccagcttcggttgaggtttagcattatggtataagccgcttcgtaagcatcggatatgtcggtcataaaatcgggattgagtggattgcaacgatggctcttgcgtgggtcgtcaaaatttatcacgtaaaattttggctgtactttgtacttgtccctgtgcttcagtaaatgattgtaggcaatggtagaaaggtcgtcaaacttgaaatcgtatatgtacatactgaaacctttctctatctgctgcttgatgtagttatttacaatcgcatacgatttacccgaacccggagtgcctaacacaattgatgccctgaatggattgacgatgttaatccagccgttgttccattttcctttgtaataaaacttcgtgggaagattgacagagtattcgttttccatcaacttggtttcctgctgaaagctctcgttctcgttgttgaaaacatcgtccatcaggttgttgcgaagcaaacggctcatccaaacgccagcgaccattaaggcgatataccctaaacctgtggttaagatatacagaaatgtagcgattaataacggtagctttagtaaagggaaattcagaaagaacaggataataccgattgctaaagccacatagattttagaccaggttatcttctcatctttaacgccctttgttcccaaacagctcaaagccaacaaaaccaaagcgaagactttggtatataaggtatgcgaaaacagccctgccgttcgctgaaagttgcctaatattttattgattaactccaatgtccagccacgctctataaagaaaccgtagcagaaccaataaaggtgcatcagcactatgatgatgcttactgcccgcataaaagccattatcttggcaagtcctcttaaatcgtcttctccctgcatttttgtaaaattttaaatgttcgggcgtgaatttagaagctgtgttgtgtggctataagaatgtggcagtgaatggcagtgtttggcattaagaggctataaagccttcaataccgttcaggtaatccaatgattttttttaaatttatactcgtgaaaaccattttgctattctcgtctgttggaacaagcaagatttaaaagaggaatgctatgaattggaataatcctgatgcttatcccggagaaactgaagaagaatatgaaattcggaaaagaggtgaaagccaagctgccaccggattaatgtctgggataataaagttttttcttttcggcttaaaaatagcggctattttcggcgtgttcttttacgccgggtttttgctgtcgcaaaaattgtggggcaaagaaactgataactttaagatttgggcattctccctattatttgcctacctcatcttctgcatcgtttattttttgaaaggaactattataggattacggagaaagaaccagaggctatggatattaccgtgggctatctgtgttttattatgctgcattgttcctgcattcattataaaatcaatagtagctggtatgttcagcgtgacagaacgagatagtatatggtgtatcgggctaagctggggagcgtttgtactttccgcattatacatctacggtatttatcaattcaaaacacctactgcacctaagattttgcattggagctatgcgttggggctgaaagtttctacataataggcaaagaaaaacctgttactgacctcgtttgcgcttccttttctttttcattctattggcaaaatcctgttcctcgtaatcctcgccctgtgcttcgggaatgagcaaaccgcccaacgcttcaaccaacccgtcttcatttttatcggtagtaacaaaatcaaacaaatggtggggttcttccgcaggaagatctgcatcatttgtccttgctattttcggtattagcttatcaggctcttttatctccggcttaatgttgttattccagtaatcattaaaggtattggcagaaagctctgttgctaaacgtgaaccgttccaaaccgttttggaattgtggtcaataaaagtgataccgtaaatacgtcctgtatcattccggcgcactactatgttaatgccctgttctcctaactgctttttaaatgcctgttcatcgcttgtggttttcagggctatggtaacggcagattttagggtctgcttggtaggattgtctttcaatgccgttttgcatttcgcaaaatgcaattccaaagccggaagccctgcgctcttgccaaacaaggaagccttgaacggatgcccggctctttcgcctttttcattcaacggaatatataataagccctgctgcatttttccttgtaattcgccctctattttctcggtggtaatattgaacagggaaagcagggcattgtattcgcccaaagtttggtattggtagtagttcggcaggtggcgaacgaccgaagctatttggctttttacatcgcccgcccgataatctaccggacggaaaaccttatcagtctggttacgttctttgtccgtagccggtattaaatgatattgtttttccagttcccggcatacattcatcgaccgcattttctcaaatttgtccgaaatctttttgccctgctcgtccacacataccgatacgatgtgaatgtggctgcggtcaatatcagtatgcttgaatacaataaaaggctgctcgccgtaacccatttcccgcatatactgctgtgccatttcccgaaatttatcatcatttacgatgtctttcgggtcgggattgagcgaaatatgcagcgtatgtttctcggtattgcggttggctatcagataaggagcgaaagattgggctaattgcgcaaccgtatattgaccgcttgcggtttcaatcatcttattggcaaacagaatttgtccgttttctttttcaattttcaggttattgtatgccaatgcaccatataaatttccgctcctaccgatttttgctatcactttttagaatggtttttgaggtattttgcttcaaattcttcggtcagttcaatgatttttctacataacatcgccatttcagccgtctgtttttccagcttaaagaggtaagccgatgcttttttctgtgaaaaattcttgtaaagcagcttaataatctggttgtaattcacgccaacgttgcggaactggctgtgaaaagaggtcagccgcatataaaaatcaaccgttcctttgtcaatctgaatggtctttatcgtcttgtcaaagatgcgggatttgataaagtgtgcctttacatccatattcgactggtcaaacagggcaagaaacttggcgttttcctcttcgttaagagaaagcgaatacctgaatatcgctgggtctgttttaagtggacgaccaatgggttttctcacttgtcttttgttgttctcgttcataataaatccatttttaacctatacaaaaccctgacttcggaaggtgttttccagccccctgcaagggcaagttgttctgcatcggaaaatacttttgagatgctgagaacacaacttgccgtgttctgttgaacacaaaaatccgccctgcgggacggattgaatgtaacagggaaaaacggctcgatgccgttccccattttttccgatttgtcaaaatatgcttgcataaatccgttaataaaaatcattctacaaagtaactacctcttattaagagtattgcaatgcgatacccggacaaatactgcctttgaacgccaaacactgccacaatgaaataagcacctatctatctgcatttctttgtacatagaaacagagataagggcgcagataagtatgcaggtaacaacataagtacctgattaaaaaagtagctaagtgcaattgtacggagatagaaaaatacctgccgacatacctgaacagatagttgagcaagtaaaaatgcaggtacgcatatcggcagatatgcagatgcaaacctgcatatctgcatacaatcctaaagaagtattcaggtacatcgctaatggagcgcatacctgcctaagtaattacatacctatatgcctatgtacaggatgatataggtagaagcctgcggagatacggacataagtaattgagtatataaataagtaaaaacagttgtaatatgaacgaaaaacaaaaaccagtatttatcgccttttcatcccaaaaaggcggtgtaggtaaaagcacctttactacgcttgttgcaagtacaatgcactaccggttaggctacaatgttgccgtattcgatgcggattttccacagcacagcctgatgaaaatgaaagaccgtgatttgaaaatgataatggaaaacgaggctttgaaaaagctggcgtacaaacaatttaccactatcaacaaaaaagcctatccaataatacagcacaaggcaaacagcgtactggaagaagcccacgaatttgtaagcagctcttcagtgccacttgatgtggtattctttgacctgcccggaacggtgaacacacccggcatcctgaaagcactggcaggaatgcaccacatttttacgcccattacggcagaccgtgtggtaatggaaagtacgctcattttcacacagcttttgcaggacgtgattatgaagaaaggagaaaccgatataaaaaccattaacctgttttggaaccaagtggatggaagggaaagtaccccgctatacggtatatataatcagcttatcgaacagttagggttaagcctgatgcaaagccaaatcaaaaacagcacacgcttccgcaaggaaagcgaagtaaacagcaaaaccatatttcgctcaaccctgatgccgcccgatgagcggctgatgaaagcctgccagttggacgagtttatgagcgaatttttaaaaatcattcaattatagtcctatggagaaagacaataagaaaaaagtaacgcccgatattaacgaggagctgatgatgaacctgatggtagatggtgtaaaaaaagagggcttacagcttccgccagaaaccgccgatgaaccggagcagaaagtaagtgtgcgggaagaaccgacaagggaaaagcctgcggttaaagagaagagcaggaccaaaaaggcaaccgaagccgattacgaaagtatctttttcaaaaagtcggaaaccaatgcccgtgatgggaaaacggtctatatccgaccagagtttcacgaaaagctgacacgtattatacaagtaattggtgaagacaagattagtatttacgcttatttggataacctgttggattatcactttcaggaatttggcgaacagattaccaagagctataacgataagtataaacccatttaataattggagctatggagattgtaattgtaatatgcctgctgatagtcattgccttgcttttgcaggacaagattgtcattaagaaaaggtcggagcaaaagccgacaaagggaaaaatcaatccgcaccttcccgatattatggggcagcctaaaccgaaattaagnnnnnnnnnnnnnnnnnnnnnnnnnnnnnnnnnnnnnnnnnnnnnnnnnnnnnnnnnnnnnnnnnnnnnnnnnnnnnnnnnnnnnnnnnnnnnnnnnnnnatggagctaagggatatggttacagctgtattaatcatttttgcaggaggaaatccagacaaagtttttaaaacttaaaagaggtcggaatttcttccgaccatgactagcaaagccgccgcagcctcaaaaaagcgagtagcgaaagctggaaaaagctcctgaaaagagaattagttgatagttgatggttgatggttgatggttgatggttgatggttgaaatttacggaataaacagaaagtggaaatttagtttttatgaatttaaagtgtttctataaaaaaaagagaccatcgcttgatgatctctttctgtatgttgaaaaaatattcttagaataattcttttctgatgatattctgacttctttcaggaccaacagatactaaataaacgttgattcctaaatatttttcgataaactcgatgtattcctgagccgtttgcggaagctcgtcgtagcttctggctttcgtgatatcttcgttccaacccggcaaatcctgatagattggttcgtagttgtataatttttcggtggatgatgtgaaataatcgatgatttttccatcttccgttttataatgcgtaactactttcagattttcaatccctgtaagaacgtctaattttgtaatcactaaattattgattccgttgatcatacaagcgtgcttcaaagaaacaagatctaaccagcctgttcttctcggtcttcctgtcgttgctccgaattctcctccgatctgtctgattttctcacccagttcgttatccagttctgaagggaaaggtccgtttccaactcttgtacagtatgctttggcaacaccaattaagttctgcaacgaagtcggcggaactcccgctcccgtacaaacgcctcctgtagatggagaagaagaagttacgtaaggatacgttccgaaatcgatatccagcattaaagcctgcgctccttcgaataaaacatttttaccgtctctgatcgcttcattcagttcaagttctgtatctactattctgtcctgaagctgttttccgatttctaaatattcgttgtaaatttcttcaacgtccaatgtaggttttccgaagtatttttcaaaaagagaattcttgatttttaagtttttctcgattttgtctctcaagatctcaggattcaaaaggtcgatcattctgattcccactcttgcaattttatcttcatagcaaggtccgatccctttttttgttgtcccgatctgcgttcctccgtgctcttcttcacggtacgtatccaaaagaatgtggtaaggcatgatgacatgcgctcttctgctgatgaaaatgtgatctgtctttaagcctttgctttcgatctgattcacctccttaatgaaagatttaggatttaccactactccgttggcaatgatacatttccctttgcactgaagaactcccgatggaagaaggtgcaaaacgaatttctcttcacctacataaaccgtgtgacccgcgttatctcccccttggaaacgtacaacgtaatctgatttagccgataaaacatccgtgatttttcctttaccttcatctccatactgaagacctacaactacgtaagttgacatattttacttttattttagattcatgcaaaattacttttaaaaaattgggtgggcaaatttgtggcggattttattttttgggtgggtgggaatcatatggttgaagaattaaaaatataattttctatatatttgaaataaaactttaacttatgaataaattagatggaaatgatttattaaactctctaacatcaactaattatattgaattcaagaactatatttttgatataaggactccattaaatattgacatcaataaaattacgttaaaaaatacttataaaaattgcatatttacaggtgatagaattgactttttaaatttaaaaattgatgacattgaaaaagagagccatattttgattttcgaaaattgtgagtttaataatgaaatatattttaaagattgctcatttcaagaaataacatttagaaattctttaaatattgagaaaatacatattgcttgtaaaaaattatcttatttaatattaaataatgaagaaaaaatagaatgtaaaaatttcaatttgatattacacaatattgatatatcaaaagaattgacaattagaaatattaaaactgaaaatagttatttggattttttacgatgtgaatttaataaagtggaaattttcaataataatttaaaaagaattgatatttcaaactcaacctgtaaaaaaacatttgatttcaacaaaaatgaaatttcagatagctatataaaagataataacttttttaaatttagctttacaagaaatgatttaaatggagaagctaattttagaaacaatgattttataggaaccactctatttgaaaaaaataaaaacgatattcgagggaaaataattattacatcttgtaattttgaaaaatacacttactttagtaatagtaatttatatgaattaaaaattgatacatctaaatttttagaaacaacatcttttcaggatgttaaaatagatatatttaatttagacagaacaatttttgaaaaaacaccttttttcgatgatttttctatagaaaaaatagatagatgtactcatagaactatcagaaatttaaaacaacaattattaagagcggataattctatcgattataatttttacagagccattgagcacagacaatataaaatatatttaaaagatcggataaaaaaaagtaaaacaaaaactgaaaaaaagagattaaaaagagatttaacaattttacgaataaatgatttctattctgataatggtgtaaattgggttaaagcaattaaacaaactttacttttagcatctattttttacatattatttttcatagtatataatttagaaaatgattttgatttacaaaaaattaacgaatttttgattggttattttaggttttttttagttacagattattataatcctctggaagatagaaagtatattgatacttggtatgcttggccatttttcataattggaaaaatcgctattggaattggaatttttgagattattaattcgtttagaaaatttaaaaagtaataatttaagcggattttttttagttaaaatccacttttaagatatcactgaaaactctattaataaaatctcttcaactattcccatctcctccaaaaacccccaatcaagcgaaatcaccaccaaagttccatgataatctttaatagaattcgtcagaatttccacattttgaaggtctaaattattcatcgggtcatcaattttcaattaattcattttgaaaaaataccaacaattggtatctttgatttaaaatcagaataatggcaaaaaacacatccatattattaggcgattatttcgagaactttatcagtcaacagattaaatctgggaaattctcttctgcaagtgaagttgtgagagctgcgttacgaatgtttgagtatgaggaatctaaaaaatcagaattaatcaatgaattaaaaaaaggtgaaaaatccggatttgttgagaattttgaccgtaaagaatttttgaaaaatattcatcagaaatattctgctgaataatgaaatacaaaatcagcaaagaagcatcaattgatttagaaaaaatttggctgtacacatccgaagtctggtcaaaagaacaggcagatcattatttcgacttactgatggatgaaattgaatatctatctgataatccaaaatcaggaaaagattataatgaaatccgaaaaggatattttcgttcaagagtgaaatcgcactttatcttttataatatcaatcttaaaaacgaagaaattgaaatcataagaattctttatcaacagatggacatttcttcaagattggaagaataaatcaaccctcacaggttttgaaaacctgtgagggttgaacaaattcacctacaaaaaaggtgtattcagaaaatcattcaaaggcttcatcactttaaagattttggaaaggtttttcacggcatttttatcgagaacttcttcatctttcaggttataaaccacgataaaacttttcagtttgagatactctcccatcggatcttccttttcaaaaccctgcggaatttttttcagcttatcatcctgatcaagatccggaaaatactttttgaattctttattattgataactttaaggaaatcctctccatacaaagaaatttcttttctcaactcctttaaaactgaagattcgggcatatagattcctccggcaatgaacgatttccccggttccagatgcagataatatccgcctttctgacttccttttcccattcccagtgaagctccgaaattcgttttataaggaattttatcctttgaaaatcgtgtatctctgtaaattctgaacagagatttcttggcatcaatttttcccagttcctcgtcaaaatctgccatttctttaatgagatcttcaagaaaagcaatcacatttttctgagattccgtgtaaaggtttttattttccgtaaaccattcgcggttattgttaacggtaagttgattaagaaaatcgaatacttttggagaaattgttgcggacatcattctgtaaagttttttttattttaaattgtaaaactgataaattgtaatgattcaaatgtacaaaaaccgaactgttttcaattatactttttccacacaaataaccaaataaagaatttaaatcgatctgaaagttcaaaatttttgaaaattcataaattccagagaaaaaataaaacacatctaataaaaaaaaacaatggttaacatctttataatttgcaccctatttttttgcatttaattttcaaaataaaagtaaaagattaaaggattctgaatttaagtttgattatttaaaaataattcaaaaacaaatcaaatatttattgtatatttgcagaaattttataatatttaatgaatttatttacggagaccaatttaagtcctgatattcttaaggcaattggcgaactgggctacgaaagcccgacagaaatccaaaaacagactatcccttttattctttcagatattcgcgacttgatcgcacttgcgcagacggggacaggcaaaacagcagcattttcgcttccgattttggatatgattgacgaaacgagtcgcaaaatccagcttttggtgctttgtccgacacgggaattatgtcttcagattgctaaagacataaagaattattctaagtacatgcacaacatcaaaaccacagccgtttatggtggaagcagtattatggagcaaatgagatctctgaaggacaaaccgcagattattgtgggaactccgggaagagtaatcgatttgattaacagaaaggctttagacttttctgctattcattggttggttttggatgaagcagatgaaatgctttccatgggtttcaaagacgaattggaaaccattttaagcgaaacgccggaaacaaaacagactttccttttctctgcaacgatgaacaaggaagtggaaagaatttccaaaaactatcttacgaagccgcacagaatttctgtaggttctattaacgaggttaaaaagaacatcaagcatgaatattatgtggcaggttaccgtcagaaaaaagaagctttaaagagattaattgattccaacccgaatcagtactccattattttctgcagaacaagaatggaaactcaggaagttgccgatttcttaatgcagaacggttacgcagcagatgcacttcacggagacctttctcaggcgcagagagatacggtaatgaagaaattcagactgaaaaatattgatattcttgtagcaacagacgttgcagctagaggtctggatgtaaattctcttacccatgttatccactattctttaccggatgatcctgaagtattcgtacacagaagcggaagaacaggaagagcaggaaaagacggaatttcaatgtctttaattaagcctgaagaaagcagaaaattaaagcagatcaaatcggctacgaaaattgaaatcacggaaggtaaaattcctaccggtgacgatattatcaaagctcaggttggtggagttttcgaaagtctattcgaaattcacgaagatttctttgaatttgatgattctctgattcctgatttatcggcattcaccaaagaagaactggctcacaaactgcttcagttccaactgaaagatcttgcaatgtactacaaagacagacatgatcttgtggagcagaaactgagcagcagagatgacgacagaggttccagaagagaccgtgacagaggaagagaccgcgacagaggggaacgtggagaaagaagcgacagaagagagcgtggtgcaaaaccaagaagaaagaacgaaaatatggttagatttttcttcaatcttggtaaaaaagaccaactgaaaaaacttgacgttttagatatcatcaataaagcgacatcgaacggaaaaagcaaaaaaagagctgagatcggcgacatcgaaattttagagaaattctctttcttcgaggttgaaaaatctttcaaaggagatcttttgagcaatatttctacaatgaaattcagaggtaaggaaatgagagctgaagaggctaattaatcttactgaaaatatacccaaaaccggctgtaaagtcggtttttttatttgataatcaggcgttcatccaatgttaacaaaacttaatgttataccctttcaggtaagggggttttttaagaaatttgcacacgaattataaaaactttacaatgggaattggtaatattttccacgcttttcaaccgaaagataaaatcttctttgtgcttttcgaaaaagtaacagaaaaccttgtagcaatgtctgaggaattcaaccacggaatcaaagatttcgatctgaacgacgattctatgttgaaaaagatgagcgattacgaacacaaaaatgatgagcttactcacgagatcttcgtagaattggggaaaaacttcatcactcctttcgacagggaagatatccacactctagcaacaggattagacgatatcgcagattacatctacgcttccacaaaatatattttcctttacaaatcgcctgaaatgaaggcatactccgacttctcattactgattcacaaagcttgccttgagattcagaatgcaatgaaaaacctgaaaggatttaaaaatatggagcaggtaaaagaagcttgtatcaaagtaaactctatcgaaaacattgcagacgatttgttatccaattctatggtagaattgtttgaaacaaacgatgcgatcaacattatcaaagtttcatctgtacttaattatcttgaagtcgtaaccgacaaagcagaagatgttgccaacacgattgaaaacatcatgattaaatacgcttaattaataattataattaaacaatggaatttccgattttacttatagttattattgcattggctttaatattcgattacatcaatggttttcatgatgcagccaactcaattgcgactattgtttctacaaaagttttaactccgttccaggcggttctttgggcagcactctggaattttgcagctttctttatcgctgcttacatcattggagaatttaaaattggtaatacaattgccaaaacagttaatgagaattttatcaccctcgaagttatcttttcaggtctagttgcagcaatcgcatggaaccttttaacatggtggtttggtattccttcttcctcttcacacacactgatcggaggatttttaggagcagctttaatgcacgcttttatgatggattaccacaacgttgcagcagcacagccggaattgggaacttgggaaaccgtaaaagcagccgcttcgcaggtaacacaccagagcgttgtgaaatttgataaagtaatccctattttccttttcattttcatggctccgattatcgggatgattatctcaattatcattactttaattattgttcacctttataaaagatcaaacccgcataaagcagaccagtctttcaaaaaactgcagcttgcttcttcggcgcttttcagtttaggacacggtcttaacgatgcgcagaaggtaatgggaatcattggtgcagcattaatttactatcatgttgaaatgcttcacgacccgatttatttaaatcttgaatcagcagcacgttttgattatttcgcacagcattatatctgggttcctctggtttcgtttatcgcgatcgctttgggtacaatgagtggtggatggaagatcatcaaaaccatgggaacgaaaattacaaaagtaacttctctggaaggagtaagtgctgaaacagcaggtgctattacgttattcattacagatcacttcggaattcctgtttctaccacacatacgattacaggttcaattatcggggttggtcttaccaaaagagtttctgccgtaagatggggaatcaccgtaagccttctttgggcatgggttcttaccattccgatctctgcaattgttgccggaattacttaccttgcagtaacggcattatcttaaacaactgagattactcaaaataataaaactttgctctttcgggcaaagttttttgttttttaaagtttaaaatttttattaattttatatagattaaattataagctatgagcactgcagaattacagatagacctgattaatcagatcacaggtattaccaacaaagcaagattaaaagaactattgcagcttcttgaatttcaaaacgatgaagaaatctacataaccaatgaagaagaaaaaaaagcagtttcggaagcaagaacagaaataaaagaaggaagtattttatctgatgaagattttcagaaagaaatcaatgcatggctaaacaaataatctggacaaaaagagccagcaatgaatggcttgatatccttcagtattggattaacaggaacaaatccaactcattcagtataaagcttaataatttaatcaaaaataatttagaattactttctgaatttccggatatcggaagaaagacagatataccaaacgtttccgtaaagattgttcataaataccttctttattaagaatgtgtagatcataaaatttatattctcaccattcgacatggaagtaaaaatccggatacagttcaattaaaataatttttgacctaataataaatcttcactcttaaaacggtgaggattttgttttataaagccctgaaaaattgtatttttgcttaaactattagaatttatggaatttttagacagatatcagcagattgttgcggatgccattaccaaatatactttcaaagataagccaacagaactttacgaacccatgaactatattatttcgcacggaggaaagcgtcttcgtccgatcatggttctgatggcctgcgatttgtttggaggtgatcttaaagaagctataaagccggctctggcaattgaatttttccataacttcacgctgatccatgatgacattatggatgaagcaccattaagaagaaacaaaccaacgattcataccttacacggaattaacgtaggaattctttcaggagacggactgatgttgaaagcctataaatttttcgaagatcttgagcctgagattttcaaagcgtgcataaggatttttacccatacaggactacttttatgcgaaggacagcaatatgatatcaattttgaaactcaggaaaatgtaacgtttgacgattatatcagaatgattacctacaaaacaggagttttaagcgcttcttcctttgaaatcggagcattgattgctaaagcaaacttcaaggatgcaaaagccatttttaacttcggaaaacatatcggaattgcattccagatcatggacgattatctggatgttttcggagatcaggcacaattcggtaaaaaacacgccggagatatttacgaaaacaaaaaaaccgttctttacctgatggcgagagaacacgctacagaagaagaaagaaaagagctggattactggtactctaaaaagaccgataatatcgacaaagtatacggtgtggaaaagattttcagaagaacgaaagtagatgaaaaagcattacgtcttattgaaaaacataacgaaatcggacaaagctatcttcagaaaatcgatattccggaagaaaagaaaaagccgtttgcagagcttgccaattatttattgagaagagaatcataatttgataataagtcaatttgaaaatgagtaatcataaaccttaaattttcaaattgacacattctcaaattttcaaattgattaaatgaagttcagaaccgaagttgatatcaaagaatcgaagaagaagattgaagttgaagatagaatattttcgatcggctcctgttttgcctctgaaatgtctgatctttttcagcaggggcaattgcagactatcaataatcctttcggaacgattttcaaccctttttcaatcaacaatgcagtaaaacgacttcatgatgccgaattttaccatgaaggagaactgattacctttaacgatgaatttatttccttggatcatcacacaagtttcgatacaagatatgttcaccagacgttacagaaaataaattccggtcttgaggaaggaaattcttttctccaaaaatccaactgggtgattataacttacggaagttcatttatttacgaatttacgcctaaaaacaagctcgtcgctaattgtcataaaattcctcagaaattctttaaaaaaagacttctgacctttcaggaacttacagattctgtgtacaatacaattttaaacctcaaagacatctgtccggacgatgtccagatcttatttactgtttctccggttcgccataccaaagacggtatgattgaaaatcagctgagtaaatctaaactgatcacggcaattcatgagatgatcgatgagatggattactgtcattatcttccggtttatgaaatcttgatggacgatctccgcgattaccgtttttacaaagaagatatgattcaccctaacaatcaggcaattaattatattttcgaaaaattcggaaatgcttatttttcggatgagacaaaagattttattaaagaaaattttaaaatccacaaagcgttggagcataaaaccaacgacgaaaaagatccgaaatacattgaatttaaagaaaaattaaacctaagaatcgaagctcagcgaaaaaaagtaaagcataaaatctttcccaatgattgatttcacaaagatcgactatctgaaaaacggaaatgaaaggcaaaaaagagcttatgaagttttgacgagatatcagatttttgaaaaactgaagaattattctcccattttggcaggaaccattcccatagaaattgatattgaagaaagtgatctggatatcatctgtgaagtaacagatttcactgaatttaagaaagtactttctgaaatgttctctgaatttgatttaaaaattgaaaaaatcatggtaaataatgaacaagccactgttttaaatttcaaactggaagaatttcctgttgaaattttcggacaaaacaaacctgcaaccgaacagaacgcttaccgacacatgatcgctgaatacaaaatactacaggaaaaaggaaacgattttaaaaagaaaataatagaattaaaaaacagggcatcaaaacggaacccgctttcggtatcttgctgaatttggaaaaaccttacgaagacctgttaaaaatgatataaaaatgattgacacacatacacacttatacgcagaagaatttgatgaagacagaaaagaagccattcagaaagcattagataaaggaattacagaattttatctcccggcaatcgattcggaatctcacgaaaaaatgctgcaactggagacagaatatccggaacatatcttttcgatgatgggactgcatccctgttacgtaaaaccggaatcctgggaaaaagaactcgaaatcgttaagaattacctcgatcaaaggtcttttcctgccatcggagaaatcggaatcgatctgtactgggataaaaccactcttgatattcaggtgaaagcttttgaacagcaaatcgactgggcaattgaaaaggatcttcctatcgtaatccataccagagaaagctttgatgaaacttttgaagtactggaaagaaaaaaacatccgaaacttagagggattttccactgtttttcagggaatttagaacaggcaaaacgggcaatagacctgaatttcattttagggatcggaggtgttgtaaccttcaaaaatggtaaaatagatcagtttctgaatgaaatcactttggataaaatcgttctggaaacagattctccttatctcgctccggttccttacagaggaaaacgaaatgaaagctcctatcttgatctggttgccggaaaactggttgatctctataaaacagacttttctgagattgacagaattactactgagaatgcgaagaagatattcgttcagatttaaaaataaaagccttccggatttggaaggctttcgcattatttctttctggtgaaatttttattcttaggctttttaaaaccaaccgatgccgctccattatccggctttgccttatttcggctgaattttgaagaatttcctcttgcctgtttaggttttccccctcctgcaggaactggcttgttgttcgaatctcttttctgagcaaccagattgtctgtatgaaacggatgattttttaccacaggaattttcattccgatcagtttctccgtattgcgcagattcagaagatccagaccgtctacaaacgaaatagaagttccttccgctcctgctctacccgttcttccgattctgtgaacatacgtttcagaaacatcggaaagctcaaaattaacaacatatttaagttcatcaatatcaatccctcttgctgcaatgtctgtcgcaaccagaaccctggtttttccggatttaaaattacttaaagcattctgacgcgcgttctgggatttatttccgtgaatagcctctgttgtaatatcatctttctgtagttttctcgcaattttatccgcaccgtgtttcgttcttgcaaaaaccaagacagaatctgaaatatcgttctttaaaatatgtgttaaaagattcagtttattatccttctctacaaagtaaaccgactgtttaatcgtttctgcggtagatgaaaccggagtaacttctacttttacgggattattaagaatagaatctgccagtttctgtatttctgaaggcatggttgcagagaagaacaaagtctgccttttttgaggcaaaagtttaataattcttttcacatcatgaacaaaacccatatccagcattctgtcggcttcatccagtacaaaaatttcaagattttttaagctgatgattccctgagcaataaaatccagaagtcttcccggtgttgccacgagaatatcaactccttttttcaatgcagcttcctgatttccctgctttacacctccaaaaattacgagatgttttaatggtaaatattttccgtaagcattgatgttttcttcaatctggattgccagttctctggtaggcgttaagattaaagcttttatatttttgtttggaaatttgttctgagcaagattctggaggataggaatcgcaaaagctgccgtttttcctgtccctgtctgagcgcaacccaaaaaatctttaccttttataatttccggaatggatttttcctgaataggagtcgggttggtatatccttgttcccgaattgcttttgcaataggatcaattaaatgtaagtctgtaaaattcaaataaattgtatttaataattaaaacaaaattccttcaaaatgaaggaattatattttgcaaaggtagcttaaatatttttaatgaatcaattcacttttgtccattgctgactgaatcttaaatcttcaaaaaacttatataattcttcaagcttttcggttcctcttttcccataatcttcgacatgttttgaagttccgtcagcaaaattgattctcaaatgggaagttgggagatccgtaatatttctttcaccatatttttcattcagttttttcacctccaaaccgtccagtaaagcaatcagtttattatagtcttcctgctttattgttcctttaaaagttccttcacggggtttattgaaatctcctttagaaaatccgttcgtaaaattaaaatgttctgcatcaaaaacagcagttctgtcaggattaatggttattttaaaaataggacaagatccgaaacaggctcctgcatcatattcgatttttgaatattttgaattgtttttttgcggggtacaagaaaataggaaaataaaggcaaaaagactgaatatatatttcatagcttacatttgagtggtgtgtttcaataattgttccaaaatattattgtagtaactacaactttgaaaagaattttcaagcagaaaatagtttcaaatgtattaatttttgatacagcattatttttagaataaaaaaacagaactctgacgaattctgtttataataaaccgttaagtatattttaaccctcttgtggaagacataccggtaaatctggagcacaaggactgttcaatgttcctgctgcatagtaaattctacgttcacaggtaacttcatcataacatcttttcataccgggcaaagctcctcctttaatttcttttaattcttctcttttaatttttttcaaatttttcatagtaattaatttaagttttcaaaaataattaaaatatcattaagtagtgatttttattttaaaaaataagaaatttgttacattatctttactctgtattaataatcaacatcatatgaaaatataaatctaattttgttgagaattttatcaaactttaagttaaataaaactttattccgaaataaatttaagcctattttttttaattcataatgacttgcataatctctgacaataattgttctaaatataaaaaggtattcggataaatttttgttattttgacaattgtaattttctgatatgtataatttcctcaaatccattattaaaagttttattcctcaaaatgttcttgtaaaaaatgaagaaaattttagaaaaatcttaaaacctttatataaagggaaaaaccatcagtgtaatgtatgtgaaacccagcttaaaaattttgcaaaacttaataatggagatttgatttgccctgtatgcgggagcatttccagaaccagaagactttataagcttttaaatgaggaatttattgttcctgatattgcgatattagatttttcacctttcagaatattatacagaaaatggaaaaagaaaaccaacatacaatattttgctacagatttcggaaccgattttatagctgactaccgctacgatattaccaatattgactgtaaagacgaaacttttgatctcattatctgttatcatattttagaacatattgtagatgataaaaaagcaatgagtgaactttatcgggttttgaagaaaaatggaacagtcttaattcagacaccatttaaagagggagaaatttatgaagattattctatcgttacggagaaagagagattaaaacatttcgggcaggaggatcatgtgaggatttattctgttgagggattaaaagaaagattgcaagactctggttttttcgtaaatgtcaaaatttttgagaaagatatttatctgggattacaaaagaacgaaacggtgattatctgcaaaaaataaaggagaaacaaagcgtttctccttttatattttagtattggttaaatcctatccatgtaatttcttccagatcacatctttcagttccataagaccttctccggtaacacctgagaaaaataaaggctgtctgttttcgggaaattctgcggaaatttctttcctcagctcttcatccagaagatcggactttgaaatagagataataaaatctttatccagcaattcagggttgtattcctttaattcattttcaagaattttaaactcctgaaaatgatcttcagaatctgcaggaattaaaaacaaaaggatagaattcctttcaatatgtcttaaaaaacggtgtcccaaaccttttccttcagccgctccttcaataattcccggaatatctgccattacaaaagacttgtaatttctgtaatctacaattccaagattaggtgttaaagtggtaaaagcataatctgcaattttaggtttagccgcagaaacggaggataacaacgtagattttcctgcgttcggaaaccctacaagacctacatccgcaagaattttaagctcaaaaacgacgtatccttcctgtccgtccattcccggttgcgcaaatcttggagtctggttggtagaagatttgaagtgctcatttccctttcctcccattcctccttccatcaggataatttcctgaccgtcttccagaatttcaccgatgatctcgccatcttcatttttagcaatcgttccgataggaacttcaatataaacatcggctccgtaagctcctgttaactgattctttcctccgttttcaccacgctccgcttttacgtgtcgcgtgtaacgcaaaggaagtaaagtccattcgttggcatttcccttcatgatgacgtgtcctcctcttcctccgtctcctccatccggaccgcctttaggaatatacttttcacggcggagatgcgcagaacctgctcctccatgaccgcttttacaatgaatctttacgtaatctacaaaatttgacataattttaattcaaggttttatgttgaaggttcaaagttttaaccttgaatttggaactttgaaccttgaatcaaaaatttttacttttgaaacttctctacttcagcgaaaagtttttcagagatttcattgatgtctccgacaccgttgatctctacatatttgccttgctgcttgtacagttcggctacttctgctgtttttgtgtagtattcttttattctgttttggatgatctccacattgctgtcgtctgatcttccgctgatttctcctcttttcaataatcggtctaccaaaattgaatcttcaaccaccaaagaaaggcatacatcaatttcatcattcagttcttctttcactattttttccaatgcttccgtctgaacagccgttctcggataaccgtcgaaaataaatcctgctgcatcggtaggttttctgatctcatcgatcagcatatctgttgttacctgatccggaaccaattctcccttatcaatgtaagattttgccaattttccaagctcggtatcatttttcatgttgaatctgaaaagatcacctgttgagatttgttttaaattgaatttctcgatcaggttttgtgcttgtgttccttttccacttcctggaggaccgaacagaacgatgtttatcataatgttgttttgcttccggcaatcggcactgcttttttcggcctgcttcctgcttttagctgtttttaagttattattaaatttatttctttattttacttttaagctaaaagctatcagctaatagccaacagcgttttaatgattgatttgtccgtcttctaactggtacaaattgggtaagtttcttcctaattcatcataatccagaccgtaccctaaaacaaatttgtttggaatttctttcccgatataatccagcttgaaatccttcttatatacttcaggtttcagtaagaatgaagctatttttacagatttaggacgttgcgtctcgttaaaatacttgaaaagactttctacagtatttccggtatctacaatatcttctaccagaatgatgtgacggtcttttacatccttcgtcagttccattttctggtaaacaattcctgtagattctgttcccacgtaagaactcatctggatgaaagcaatttcgcatggtcccggataatgcttcaaaaggtctgagaagaacataatcaccccattcaaaacacctataaaaacaggaacttcatctttataatcttcataaatctttaaagccgtagcttttacaatctcctgaatctcggcatcctccagataaggaacaaaagttttgtcgtgaactttaatactctccataaaaaattttagtagttggcaaagttacggatttttgacgaaagtttttaatggataaagatgaagagtttttaaaatcattgagctttatattttcaatgccttattacagaatgccttagaaacatttgaaatcatcctgccgaaagacaaaagaattcacttaaaattaaaactaaattttaaaattattcaagatgttaaaaatcaaatatttacaatcgcattattttaacattgttttaaccttttttcttatatttgctgattagtccaaaaaccttacaatgtctctgtaccaaagaattgctgagaagctgcaatatataagcccgaatttttataaaaaaagatattttaaaaccttaaacaatcttaccaaagataatttttcgtcgcgaaatgtagaaccggaattggtttggattaaagaattcttacctaaaaatgcagtaatctttgatatcggagccaatgtaggaagcttcctttatcagcttgaaaataagctggatcatgagaacatctatgcttttgagcccaataaaaaactgtatcaccgtctgaaaagattatttccggcaatgcggatttttcctttggcactgtctgacgaaaatacaacggctgaatttaaagttccgatcatcaacggaaaaatggttgcttcaagaggaaccctgaatacagactacaaggaaaaaggcgaagaacagagctacaccgaaagagtaaaagtgataaaactcgacgaatgggcggcaattgaacatttcagcaggctcgattttattaaaattgatgtggaaggcaatgaaatgaaaacacttcacggtgcgaagcagattattaaacagttttcaccgaccttaatggtggaaatggaacagagacatcaccagactccgatctgggatgaaatttcagaagttgaatcgtggggttatgatgcaaactacctgaacaggcacacttttgagcttaaaaaattaacggaagaaattcttttaaaaaacatcagcgacgaaaaaaataaaacagaatacatcaacaacattatttttattccgaaaaactaataaaagatgagtgtagtagcaaggcagggctttaaatattccatcattgggtatattggttttttactgggaaccgtttcaatatttattttcatgaataatcttgagttctacggaactttaagatatatcatgccaaccgcagaaatgttcgtccctttcgttgtgttcgggatttcttacgctaatgtaaaatttttccataaagtagataaagacggaaaaaagcaaaacatgctttcgctatctctgcttgctgttgtcattaattttgctatatttctgtgtatcttctttctgattccctatttttttccggaatttaagaataccaaagcctggaaaattaaaaacatcattctgccacttactttaactctttctttttgtgcaatttttaataaatatatttcgaattacaaaagaatagtcgtttctaatatttttgacaatctttttccaaaaattgccaatctgggtgcttttcttatttttatatatttagcatcacggtacgcagagccttcaactattcctgaaaaaatcgcattgattttctttttcggaatgtttgccctgatgttttttggatatattttttacacgaataaactggaaaaaataaatctggatttcagtacagattatttcaaaaaagataacttttacaaagagttcgccgcttatagttttttcgggtttttaggaacttttggaaattatttagccatcaacaactttatgattggggaatttctggggatggaagaaaacggaatttactctacactgtatgctttaatttcactaatatcgataccccaattaggtttatttaatatttcagcacctatcatcagtaaaaaccttgcagacggagatatggaaggtctggataaatttcataagaaaacatccctcactttgtattttctgggagcggttctgttttcatgcatcatcatcgggtttccttatcttacttattttatgcctaaaaacggaattcttttaagggaatatcaaccggttgtctggatttggggatctgcggttctggtcgatttagcaacgggcttcaacggaaacattatttccctttcaaaatattataaatttaatattgttgtaatgcttttattagcaggactcaccatattgttaaatctttactttttacaaaacacagatcttaaattaagcggaattgccctgtctacagctatttctcttaccacttacaatgtcattaagattattttcaactatgtaatgtttaaagtttctcctttaacgattgaaatgatttttgtatccattatctgtactttagcggtgacggttgcgattgttttgccgaattttgaaagtaatttcatcaacatgatttacaaacccgccgttgtgctgatcctgatttttatcggaaattattttaccaagattttccctgttgaagactatctgaacagaaatttcatcaaaagtatttttaaatttaaatagaaattaattcgtttaatagcttttcgagtttttgctgaacagattttttatcgaaatctttttgaaagtcgaactgactgtttttgagtgatttaaactgctccagaatatctttttgctcaggaacaataaaatctaattttgaagcataatttgaaggaaaaacagcttgttttccaaatttgatggcatccccaagatttccggtcatttttgttttgccgtagatttcctcctgactgaaaaacgtagttttctgctgaataggacaccacaaaacgtccgctttctgcatccagtcttcgaaatcggcttgagaaaccctctctgaaaaataggtaatattgatatatttcaatgaacgttccagatctataatctcttttaattcttcattttttgcttttcctaaaaagacaaattcaatgaatttattttcaggatctgaatgtttgcttaacttttcaagattgtttataattgaaaaaacccttttataatctcttctttgctgggaaactccacccggaattacaatggttaacactttattttccggtttttttaaatttttagtgtaaaaaagaggtaaaaatttcaatttatcagaacacagctcttcatccaaaaccaattgtttttttgctgtctgatagacctttgatgcatttaacagaccttctttccacaacaatttcagtctgtatatctggtcttctttaaaaatacttttgataaggctgaactttgaagatttcataaagttcatattgtgaacgatcacggaagcattgtatttttttacaatcgcaagaaaggtgttgaaataacggtgaaccgttccgatgataattacatcatatttttttaatttcaactggtctaaaatcattgaactgtccgacagaaaaatattctctccggattcaatgatctgatcttttattttttttgaaaaataataatctacggtaaattctccggaaccgttcatcacattgataaaatcctgagcaatttccgcgtgggtatcaatttctatgtaggctatttttttcaaaattctaacgtttaggctaattttatattttgttaaacggactaaaatccgtttctattgaatagattctatttttgcttatacttaattaatcataatgcttaattttaacgcaaagttcgcaagagtttttaaacattaactgattttaagctcgcaaaggcgtttcactcagcagagaacccaaagttttttaataatgccgaatcgcggacaaccacattttatttaattaattacattttcagccattttttcttcagcatattccagcgctgattgttgatgactctctgttcctcttttgaaattttcagttccaatttctgagaacggcagttttcatacgattgaatgattgaaaagaaaaacgcagccgatttgcttttcatggcttcttttgaggaagcaatgtaggctaaaaaccggttcagtcctaaaaaataaaaatatcttccgtagtaatctgccggttttatggtataatctgctccttttactttaattaatttcacgtgaagttccggcagaacaacttctttccacccaagattttccagtaaaatggcatcaatattgtcccatcccaatgtttcacgaatgcctttcatcccgataaaactttcttttcggtacgctttcatcggaccccgaacatgatgtttgttggaatttccttcatagatccattctccgtctttttcaacgtacagtaaaccaccgaccaagccgtatttcggattatttctgaatgtattttctaccgtttcaagataatcttccgataaaatgatatccgcatcaaatttacagatgatctcaaaatcctctatattctgagtattcaagccgtttttaaaagcattgattacttttgaaccgggttggtgcgcagatttctgaagatcaatcgtttcaaatctgaaatcttgatctgtgtattttctgatgacttccgaagttccgtctgtagaaccgtcattaacgaccacgactttaaaatccttaaaactctgccgttgtaaagaatctaatgtaaaaggaagattgttttcttcgttatgcgcaggaatgatgattaaaaatctcaaaagaaaaatataaatgatgaataataagcgataactgataaaatcgggttagattttaatcatttatcgcttaccgttactattatttgttgtggggtttcagcatatttttaggatcaagtatttcatccagtttctcctgagaaagaagtcctttttccaatactaaattgtacacactttttcctgtttctaaagcttctttggcaatcgctgtcgattgtttgtagccgatgtaaggatttaaggcggttacgattcctatgctgtgtttcaccatattcaggcagacttctttatttgccgtaattccgacaatacatttttcgcggagtgtatccagagcattgcttaaaaagtgaatattttccatgatcgcatgagaaagcacaggttccattacattgagctgcagttgtcctgcttctgctgcaaaagttaccgtaagatcatttccgaacactttaaaacaaacctgattaaccacttccggaataacaggatttacttttcccggcataatagatgatcccggctgcatcggaggtaaattgatttccgacaatccggctctcggtcctgaagcaagcaatcttaaatcgttgcagatttttgatagtttaacagcaagacgtttcattgcggatgaatagatcacataagaacctgtatccggcgttgcttccaccagatccggcgctgaaacgacaggaaaacctgttaactgcgctaaatttttcgcgcagagtgttgcatatccaaccggagcattaattcctgtcccgatcgcagtggcacccatatttacttctacaaaaagattggcgttattatttaatttagaaatatcttcttccaaagtagctgcaaaggcttcaaattcctgtcccaaagtcataggaaccgcatcctgaagctgcgttcttcccattttgataacatcctgaaattctttccctttcgatctgaaagcttcaacgattttctccagtttttctacaagagaaatgttcatctgaagcagtcccattttaattgccgtaggataagcatcgttggtagactgggaaagattgatatgatcgttgggtgaacagaattcatactgtcctttatttttcccaagtttttccagaacacggttggcaattacttcattggcattcatattaatggaagttcctgcacccccctgaatcatatccaccggaaactgatcgtgcagctctccgttgattaattcatcacaaacttcagcaatggtaaaatataaattttcatccagcagacccagctcataattggttttggctgccgctttttttacgaaagccaaccctttgatgaactccggatatgaagataaaagctgtcctgaaattttaaaattattaatcgctctttgcgtctgtactccataataagcattcaccggaacttctaattctcccagcaaatcgctttctttcctgaaattttccattacagattttttaattattttgagactttaaagatagcaaaaacgcatcgaaaccgatgcgctttccttatttattttgtaggatattttacgtttaaagcctgcaatatggagaaggtttccgcgtccattattccgtcgtaattctgtggtctgaagtgatactggaatgcttctattgtttttttggtggcatcatcccatttaccgctcagatctaaggcatacccgaatttctgcaactgcgtctgaacattgaaaataaacgtcggatcgttgtattttgactggaaatccgtagatgttgccagatcataaaaactttgcttcacggcatcatcataccacattccgatctggtattcgtcgtataattttttccatggaaataaaggtcccggatcctgttttcttgtaggtgcaatatctgaatgcgccagaatattggttgccggaatattatatctcgccacaatatctttcaccaaagcagctactttttttacctgagcttcatcaaaaggcatgaaggttctctttcctgcagcgtctgtcgtgaatcctgaatttacaatctcaattccaatagatgtatcattaaggtttttatcggctctccaagcgcttactccggcgtgatacgaacgcttattttcatctaccaactgataaatttcgttatctcctgtattatttacaagataatgtgcacttaccgcctgctgagataatacggtaatggatttatcatccggtaaagctgtataatgtaagattaaatatcgctgtctgaaattctgtgcaattgccggaaagtaagttttcaccactttataacctgcgggttttgccgaaacaatagaaccataacttgcggtgttgtcatttttagtaatatctgcaatattggttgtaaaaaattctactccgtgatcggaagtaattttaggttttggcttatcattacccgaagtctgagtagcagttttcggctgtaccgcgggagttctggggatgtactgtttttttttagcattttgctgagaagtgcaggaaaaaatcaaagaacttaatccgatgatatataatgtattacgcatttgtttactttttttgttgtttattacctcaaaaatacacaaatttttcttgaaaaatatttggtaaataaagaaatctgttctatatttgcactcgcaataaaggaacaacgatcattaaaaaataagataaacaggagggttgccggagtggttaacggagcagtttgctaaactgtcgacgcgaaagtgtcgcaagggttcgaatcccttaccctccgcttttctatatatcttttcggggcgtagcgtagtccggtcatcgcgcctggtttgggaccaggaggtcgcaggttcgaatcctgccgccccgactttttttaacgcgcttatctactaactaagcgggaatcaactttataatgggtgcgtagctcagctggatagagcatctgccttctaagcagacggtcaaaggttcgaatcctttcgcgctcacagaaacctcatagcttttgttatgaggttttttgtttatattagttttcatatgctgctgctatatccttttttctaagtatttaaataaatattacatcggacattcctgttaaatcttacaggaaagattaatgaaacatttatcggatcgcaaagggtttacttcaaaagctaaagactggataatcgtttattcagaaagttttgattataagaatgaagcctataatcgggaacgagaaataaaatcgtggaaaagcagttccaaaattcaaaagctaattgaaagttcagcctgatagagcatcccgatcataatcgggacggtcaaaggttcgaatcctttcgcgctcacaaaaacctcatagcttttgttatgaggttttttgtttatattaactttatattttttatccatcaatctacatcactcaaacttcatacagaacagaaacatcaaatggaaatttaatttcccttaacaaatccgaggcttctaattcatgaaaaacaatactttcatcatttgataaagaaatcgattttactaaataaacattctcttttttattattacttctaaaaaattcattaataatattccactcttttctcttaaaggttttaaggtttaccggaattgattctatccgtaagaatgatatttcatcaattttcacgcaatagtatgtcttctcatgagttttaaagtttttgtgaatacaatgaaatagatacacgtccttttcaaacgaaactactgatgtgataatatcgtcataccaatcaattatatgtaaattagtaatggtcatttgttttagtttagcttttaactcttacattatgttttgctccgcagaattatgaatttagatgttctgaaatcctttgatataaaacacagccccataaaaatgataaccaacctttatcattaagcttttttaccatttccgatataaacaactttatcctgaaaaatgtaaaataaatcttttctaacgttcagcctgcattgatcaattttcatttctaacaattcctgctgtaaattttcacctatattttcaattccgtattgatagaaatttttattggaatggtgttctaaacttctgatgttttcagtttgtatttttgaaatagtcacgcatagccttcgttccaaatagaaattataaataaacgaaatcacaagcaaaagaatgaataaaaacaaaattttatttttcatttaaatttcatctaaaataatggttattaaacaggtaaagataacaaaaacagacgttcaaaaaattaaccaaaaattatttcaattttactttcataattcaaaaaaagtttatacatttgcaaccacaaaaaacaagataattcttgttaaaaagatgacctcaatcggggcgtagcgtagtccggtcatcgcgcctggtttgggaccaggaggtcgcaggttcgaatcctgccgccccgacagttttagggtgcgtagctcagctggatagagcatctgccttctaagcagacggtcaaaggttcgaatcctttcgcgctcacttaagcctcataactttgttatgaggttttttgtttacattaatttatgtgctactgctatattcttttttctaaatctttaaataaatattatgtcggacattcctgtgaaattttacaggaaagattaaggaaacatttatcggatcataatggctttacttcgaaagctaaagactggataattgtttattcagaaagttttgattctaaaattgaagcttataaaagagaaagggaaataaagtcatggaaaagcagttccaaaatccaaaagctaattgagagttcagccggatagagcatcccgattttaatcgggacggtcaaaggttcgaatcctttcgcgctcacttaaaaaactcacaattttgttgtgagttttttgtttataataacccaaagatattaccctctttccttttttagatattcaataaactttgaaggaggaatccccattttttcgataaaaattctgctgaaaacggtgtgagaagaaaatccgcattcttcggcgagatagctgatcttgtaattcagatattcgggattctgttttaacttcataacaatatagtcgattcttaactggtttagatagctattaaaattgctttgtttatgctttttaataatggatgaaagataattcgtgttcgttcctatctgcgcagaaaggacgcttaaagacatcgaaggggataaaaactgtttcttttgttcaaacttactcagtttatccagaatttcgttttctttttcatcagaaagattatttttattagacttggtattgttttcatcttttatcggggctggaatttgcttttctaaatgtgcattaatttccataaatctttttttatattttttcagcgtaaaaaaacgatggactaaataagcagtaagcaatcctaacactaaaacagctatccatagatagctcataaagctttttgtatggttcaattcatattcaagaggttgtatttggtctaaattatagagtttggcaatgaaatctgccttagaattgtaatcaaacttttgatttgccttctcataaagccgggaatatttaagatatgctttttcatctcccattttatcagttgcctgcattgcgattttataaagttcaagctcgtagttgataaatccaaaacttatttgttttgatttaagtgcctgttcacagtaagccaatgaggtttcatatttttttttgagaagataagcctgtgctaaatagtacgagtcgtaaaaaactgttactttgtcatctctaaattcatttaaatctttatttgccttttcaatagcatcatcgagatttcccgataaaatagcgtaatgaatttcactatcacgtactccttcgctatccaaatcacttaaagacaaaggtaaacttttgattttttttagataaaaagctgcagaatctaattttttctgcagcagataggcgtctacaatactgttatatttttcccgcttagcacgatttatttctagaaaaatttccggtgcgatttttttttgattagccagataatcatccaaatcttttactgcttttatgtagccttttattttcttgttaaaatcacctattactccatacaccaaaccttcatcacctccaaaaatcaattcctgaatgttagacttatccttggattcgtacattctcttttttttcaggcaggacaatgccaaatcattcttattttgaagagcatatattaatgctatcatattcaaattgttggcatacattgtaaaatcctcttctttttgtgcgtaaaaattagaaatttttataaactgtagtgatttattgaagttattcattatctccagataatacttttctccacagattctataatatttcattttatctttgtcggacaaatttctttttgccatctcatcacaatagattttaggatttttttcagaataagattttctgatgagatcacccaaagaatatttttgtaaagaatctgcattcttctgaatatttttttgtcccgctatggcacacacaggaatacagtatagaaataatatgaatatttttttacggaagaagcttttcatcattcttaggtttatacaaaaataacatttcagttgtatagtatgcttattttctatgatttaaaatactgatatgatatgttttatcaatattctttttaaattataacaaacataaataaaaagcacctcaaattaatctgaggtgctaatcaaaattatttctaaaaaacgaggctgtctaaaattaaatattgactttttgcctttctgacatcagcgaaaataaaacgattaagatactttccaacattttatttcgcggaataatatttttaaaagcaacccgtttattgttatcgaaatttgttcagaatttaaaaaacattcttttcctaaatttcgctcttagatataggatgaaatccataatcttttctgattaattagtaaagatcttatattaattattgtaattatccgacacccaatacgttccgttacttgtaatggtaactttattaagattcgctccccaagctatctgatagttggtaactgccggtaatccgtaagcaaactgtccgctgttggctgtattataaatcggataatttgtccagatataagtatatgctccggaaggataattcgcttcataagaattgttgtaaattttcagttgtcttcctttgcatgtagcaggatccggcaagatgaaattagctgccgcattgattcctaaaggaagtgtgtaaggcgttgaatttcctatggaaacattaaaaccaagcgcattggtagattttgcctgccattctatgagataatcatcagatttaacgatatacggagaggaacctgcctgattattattggcattaaatgttcctcctgcacccacaatcttataatcgacaaaaacagctcctgatcctgagcctcctacacagttccatgctgaaccatcaaacagggaaagacattttttggcagtatcatacacaatcatgccgcgctctgaagcagatgctcccaaagcattgatttgtgccgaggtaagtcttgtaggtaaaaaacctttatctgtagcagataattctaaaagcgctttgctgttttctgtatttttatctccgatggtaacagatccgctgttatggataaaagtaccattgccggttgaaggctgattttgaaaataggcaattttagtatcatccagtccactgttgtatactgcttctgtacctattgcaattttttccacagctattcccgactgagcttctacatgagatactgatgatagtgcaaatgcacctgcaatgataaataatttcttcattttttgtttgatttttattttatttaacgataaacttggtttgatactggttttgagcatccttaattgtaaaaatgtataatccctgattcaaaggattgattctgatttcctgtactcctctatcggcagtactaatgtttgaaagaagctgaactacatttcctgctgcgttataaatttttacctcagcatttttgtaagactcttttgaagatagctggagaatcccctgctttgcctgtgaagctgctaatttggtagtttctgtatttaccaaatcctgaatatctttctcttttcctctgcttattttcagaagaccaacttttccttcagtcgaagatgttttattactttgatgtagtactgcggtaaacaaaattccattaccgttttcatgctctttattcgcaggtaatttaagatcctgcagttttgcaatacttcctgttaaattcgtaatgtcttcatcggtaaataattcgcaggcagcttttatcgtgttaaaattgcttatttttaatactaccaaatgatcttcattataattaaaagtatttgcaggatatgctttgttttcaggattattgctgtctgttaaagtaaatacaaattgttttcccacattttttaccgccagttgtacaaaactgtttcctttatacatggaagttggtaccttcagatccagaagatgaaattcttttttttcatcaattttcgaaaggttaaggataaaagaaaccagcaaggtattttcttctttggaaacgttggtgtaaatgttttgtaaagctcccaattcccctattacaaagtgtttttgcgtagttccataacccggatatgccatcaggttttccgcaaaaagcccttcgtttatgcttttagcgatcttgccactcgttgtttttgtagtggcgtacttttcgtaattttctgttttcagtgtctgctgggcaaaccctagtgaagaacatactaaaagtacgaatacatattttttgttcataaaaattattttaaaaaaattctgttttataatttcttaaaatcaagaatgttacatttttttacagattattctgtttctgttttaaattcagaaagtttcaaaacatcagaaaaatcaaggctgtgttactacaaaaaagttactgtttggagtaaaagtataggtctgattggtagatccgcccagtgtaatattaatttccggataatacgtactgccgttcgttaaataggctgcgaaaatataggttccggtaattgtggttcccgaagtattgatagactgtgatgatcctgaaactccgtttatggcaaaactgatcaccggtgtagcgcccgttccgcttcttgtaaagttatacgcaatagaaaaaactcttactccgtcgccttttgctgtaaatttgcctgttgaaatatcaaattcatttaaattatctgccactttccccccgaatgttttattgtttaaagcaatctgtgtggtagaagaagttccggcagtaattacaaaactctgtgttcctgtattggttgccgatgctccggatttatccactgttgtaggttcccattgcgaagttgtaccattgtatttgaggtattgtttatctgtgggtacggctgtacttacattggctccctgcaactgattggcattccataaaggagccgtattatttaccgtaaccgaagtatttgctccgtttacaacagcacttgttccgttagtaatggttaccggatttgtagccgtggaagagcttgtacccgtattaagatcatttctggtgatagcgattgtggctgttcctgtagaagcacttactgtgatgggagcggttgaagataaactcgtaacacctgtattcgataatgttccggcagataatcccaatcctgatcccagtgtaatatcattcaattgcccgttggtgtctattcctaaaatttttgttgcagtacttgcagaagtatcagatactcttacagtacctgcgacatctaattttgcagcgggcgcagtggtaccaatccctacattagtatctgttccggagttcacacctgtaatccctcctaaaattaaactgttgctttgtgttacagaagcccgataacctattgccgttgcattggttagaccattgtttattactgttgaagcaccaacacctgtatttccggtaccagtggtcatactccctaaagaagattgcccaatagcagtattgtatgttcccgctgctgcacctccaaaacctaaaacagataaagaattttgtcccacagcaacgttttgactgcctgtaatattattatttaatgcagtatctccaagagctacgttgttattacctgttgtattattaaataaagtattagaacccactgccatgtttctaaaacctgtgttgtttgctaaagcaaaagctcctatggctgtattgtcaactgatgtaattgtatttaaagacattgcacgagaaccaaaaactgtatttcttgtccctgttgttattcctgtacctgcatatgatccaaacaaagtgttatcgtctccagttgtaatggcagatcccgcattgtaaccaaaagaggttctatgatcaaaaccagttgtagctgttaataacgatggagcatattgtatatatcccgacaacgtattatttactttaaagactaagttttgcgcatcggtagtacccagaaaattcgtaacggatgtggttcctgcattacctgccaaagaccaaaaatttccattattcaccgtcccgtttggtatttttacccaaaccttattgctatcgaaatagtaatatccttctgaggttacgtttattgtttttgtcgtagtaggatttgctgctgctgttgcatacaccaaagttcctatttgtggagtatcatacaaagcatcttttgctttcaattcatctcctgtaagacgtggagcaagaattccatctgcagcatttacgtctgttggatttccagcaacatccaatgttgcattgggggatgtggtattgatccctacttttccgggagatgtctgtgcatttgttaaaattccggtcatggataataccattacgagtacaatttttctattcatgtttttttatgatttccttatttaattcaaataatttgattgagatccgatagtatcaacaagtaagctgagaggatacagaagaattaaaagttgggcaaaattatcatttatcgttcttcaaaataaacgaatgattcaacaaattacgattttatataataaataaacaacatcaaaaaaattgaaaatcaataacttaaacccataaatatatttttctattccccatgtattttcggagtaaaaaagacctgaaaatttcagaatattccataaaatccgaattaatggaatacattttttttaagaattaatctttttaaggaaatttgcttcggttaaaagctcactatttttattaaactatttaaagtaatttcagagttaatcaaaaaagatcatttaacattatgatgagaatttccaaggttctcagaagaaaaaaatcagaagttttttactgaacttctgtttctttattattagaaaacacaaattatggcttataaatctattcacattggcatgctcatacatcagagggtaaaagaaagcaatatggatatgaagagaattacacatttttttaagtgctgtgaagagcaaattcaaaaacattttgagagtaaagacatccgatgcgaagatctgctgaaatggtctaaactgttagaatatgattttttcaggatttactcgcagcacctgattttgcatgcgccccagagaaatgtaaattataacaaaagatcttctgggaaaacctcgtctttaccacaattccggaaaaacatctataccaaagagattattgagtttattctggaaaaggtaaataacggaaaaatgtctaaaaatgaaattatggatcagtataatattcctaaaaccaccttatataaatggatttacaaacatgataaaagtctcatcaggcaaaatgaaacatcaatcacataaaaatgcagaccatattacgcggcatcagcttaaagaaaaaagcaaacaggaaatcattcatcttttaggagaaaaaaatttagcccattctgaagaagatctgtggatttatgtagaaagaaaaaaaataatgaagaaagttctgtatgtgtattttgaaaatgaaaaggtaagttttacagtagaaagatattattattggtatgaaagaattaaaaaaaccgaattataaaagaatttacaatgatctgttgtccgaaaaatatcccgaaaaaaaggaaaaatgcacaaaactgctttccaaaaaacatctgtcttttgtagacattataagactgaatgagcttatattcggtaagaacaatgaagcttttaatcagcaataccgttcctacgacaaaaaaacaatatccgagattcttgaatatcaaaaaaagaataacctcaacaatagccagcttgccagtcattttaaaatgagcagaaatactgttacaaaatggaaaaaaataaaggaaataaatttcatccgataaaaaaacacttcatatataacagcgtcctgatttgttgatcaataaatgatttctgaaacagcaggacaaattaattcaacctgaaagttgcaattaaaaaccaaaagaggactgaaatggatcagtcctattttaatttataccccttcaatcaatatataatgattgattcattttatttcagtttgtaagaatttccgtcccaactatacactttagtagcctttttcttcttttcacggtctttttcatccttttccatttctttcattttaaagattaaagcattgggaattccgcctttgtcattcgggaagacaaattcttcagaatggtaataaacatcggcatcaccaacgctcattaactgaggtaaagctatcagctttttatttctaaacaaaatatattgatcataacttggaattccacaagcctcacccgaaacagtggcttttaaagtcagttcaacatttttcagcttatgattgctttccgttgcaaaacttccgtagcttaaactttctcccgaacctgtttcaaaagaaacctcatcaatcagtgtattttcttccataacttttacagaagcgtaattttgttgaatggttccgttaaaatcaggatttttcttcgataatgttttggtgagaccgaaaagaaaatcgtagccattcttatttctgtatcctatacacagatttccgccccaaacgtagccttctgaagttgaatcgcctttctggtaagaaattttataccagtttgctcttctttcacctaatttcaggatcgtttcgtcttttttaataattaaaatctgctgattgctctgcaaagaatctaaaattggagaactaatattcggagactgtcttattctcgtccagtccgtgaatattttctgtgttttattttcttcaaaatcgaaaactccgtttgcgtacacgtaatcgtcttcctgcgcagagaaaatctgaacaacgaatacaaacaagatggtgaaaaaggttttcataagacttggttaaaactgaggttaagactaaggctaagattgaggtttaggctagatgaaaatttgattgtttatttttcaagcagcaagcttacccattcttctctctgaagtttttttgtaagcgttaaaccgttttccttacacacttcaagaatatcatccacatcaaagaaacacaatccggaaagcagtaatttcccaccttcatttaaaacagaaacatacgtcggaatgtctgaaattaaaatatttctgttgatgtttgccaaaataatatcgtaatgttctttgcctaaattttctgcagttcccagctcaatatccagttccacattatttcttactgcattttctttggaattttctaccgaccattcatcaatatcaatcgctttggtttctccggctccgatctgttttgcataaattgccagaaccgacgttccacaacccatatccagaacttttttaccgttaaaatcaatatccatcatctgttggatcatcagatgcgttgtcggatgatgccctgttccgaaagacattttcggctgaataacaatttcgtgcattcccggaactgattcatggaactctgctctgatcaagactttatcatcaatattaataggctcaaagttcttttcccattcttcattccagttgatgtttggcatttctttaaaagtatattcaatttttacctcatcattctgaaaaagcggcaacgctttcagctcttcttcattaaataaatctttctgaatatatcctaagataccatttatttcttccgtaaaactgtcgaaacctatctcaataagttctgccattaatatttcgttccacggctgaagcggtgtgattttgaaatcgaattctaaataattttgcatgtgaataatttgttgcaaaaataaaactactttttcgatttattggaatattgctggttttgtttttaagtgattagttttgtttttaacacaaagtccgcgaagattttcttttaaaaacttactgcatatttttaagttcactaaggcgtttcactcagcaaagacaacacgcttactttgtcattctgatgaaggaaaaatctctgttttttattacatcctaattattttttaagcgtacccttcagtttacctgcaaattcttaatctttcttaactgcttaaatgttcttaatggtttctttttaaacgcaatacacgcaaagatatatttgaaattattgagaatattcttcgttcgcaagggcgtttcactcagcgaaggtaacacggttactttgtcattctgacgaaggaagaatctatcttttcttaacttcttaaatctccttaatggtttctttttaaacgcaatacacgcaaaggtttctttgaaattattgaaaacattcttcgttcgcaagggcgtttcactcagcaaagatgatacagttactttgtcattctgacgaaggaagaatctctattttctatttctggaatattgctggttttgtttttaacacaaaatgcgcaaagatttttttaaaacttactggatatttttaagttcgctaaggcgttccacttaaccaagcacacaaagagttttttactacaccctaattaatttttaacttatccttctgtttgcctaaaaactcttaattcttcttaactgcttaaatgttcttaatggtttctttttaaacgcaatacacgcaaaggtttatttgaaattattgagaatatttttcgttcgcaagggcgtttcactcagaaaagatgacacagttactttgtcattctgacgaaggaagaatctctacttctgacggaagaaaaatctgtcgtttattgattagagattcttcactctcacttcgttcccgttcagaatgacagatttcccgcagaaaaaaagcgaaccgaagtccgcttttatgattgctttatatcttgagtctgaaaaaatccagaactcaaaactttaaactttagactttaaaccaattaaggattggtagagaaaatagaaccgtttgcgatcaacgctcttctgttcatttttaaaatatctcttacccactctgcaaagtcttccggctgaagaactttttcaggatttccgtctgttaagcctccctgaatcgacatatctgaagcaatggtactcggtgttaaggtaatcacacgaatattctgttttctccattctgccatcatcgactgagaaagagaaaccaccgctgccttggatgctgcgtaagccgacatattaggtccgcctttcagacctgccgtagatgcaacgtttacaatatccccctctcctttttctttcatgaaaggataaactgcttttgctgcataatataccccgaaaagattggttttaatcacctgttcccaggtttcggaaggcatttcttcaatagaaccgaaatctccgatccctgcgttgttaattaaaatatcaacacctcccaattgctcggcaatagactcgattcctgcttttacatggatttcattatcaatactgaaaactgcgtaagccgattttactcccagtttctggatttcatcgactaccattttaaggttttcttcatttcttcccgtaatggctacgtttactccttcatttgccaaagctaaagccacagcttttcccaatcctcttccgcctcctgtaacgatggcattttttccgtttatattcatttttaaagaattttttattcgttgatgcaaatttacgaaacattagccgagctaaaaatccgtattatgattaatttaaaaataaccgcttatgtttaaagcaaaaccgactccaaaacagagccggttcctttgaaagtatagtaataaatgaaaattaaggaataataatctggttctgtacctcaaattcttctgttgcagagaactggtttccgtacatatccgttgctcttacctcaaccttatgttttcccaaagcaagttttttcgggaaatctccagtccagatatgctttgaagcttccggattggagggtcttcttcccgggaaaatagtctgcgtcgtgtcccatttgaaaaccgacatcgcaaaacttggatctacggtttcgtcatactgcatttcttcccatttttcgccgtcaattctgtattctaccttatcttttttgcttcccatgaagaaatttgccaaaacttttgcagacgtttttgaagggaaaggaactactttcggaacatataaattgatctgataatcttccggttttccggcagttttgtattttactttatattcattatcgttaaaactgatgaaagaatatccttttgctgttccgtctctcatcgtggaagtcggcaatcccaaatcatccgaagttccggaccaccagtcgccgcaggttgttcctacattgtattcgtgaagatctttagaaccgttccatcctgctgttttcccgtaaaaaagctgctgctgaatgtgagtgtgcgccgaaagcaacaaagcatttttaaacggagcaaggttatcaaataatttctggcggtctgcatttctgaaattgtcttcatttttatgctccagaggaatatggaaagaaacaacgatcagtttatttttatccaccagtttcagatcgttttcgataaactgcatctgatcttcacggaaacctccccaatatccttttccgtcgcgcggatcgggatacaaaatatcatccaagataataaaatgtacatttccgtaattgaaggaataatttgcaggtccgaaattggattcaaaagtctcatcggaaagcatatcttctttcgcttcgtaattcatgtcatgatttcccatcacattataccaaggaagtccgatttctttcatcacgtctgcgtaaggtttttgcaggcttaaattatctcccaccaaatccccgagactgattcctaaaaccgcatttttcttcgtgcttttcacttcatttacaatggctcttttaaaataatccaactgtttttccgtgtaaggctgcggatctccgaaaaccagaatatcaaaatttttgctttcattctgcttatttaaggcaaaattaatttctttcggcagttcgcctgtaggcgcagaacctttgtatttaaaatctgtgggcgaaccttttggcttgtactgataataatattgaggaagattatttgcatttagaggagtcatataacctgaaggtttgatgacaaaaatggtctgtccgtcctgaacaggaagactgtatcttccgtttttatcggttaacacaacctgagctccgttggaaaccgccactccttcgattcctttttctttgttttccttcttcaggtttttgttgctgtcttcgtacacatatcccgaaacagaagcctgtgaaaatgccattgctgaaattaaaagacaaggcattaaaaattttatgttcattgtaataatatttgaatgtaagttttggctgaagccaatctgattatttttctgaaaatcgggctaaagcccgatcctacggataagtttatggtttattccaccacattttaacattgatattgtctccacccattgcctgaactgctgcattgtaattagctgtgttcattactttggtctgggtaggatacataaatcttaccggcatctgtccgttgttctgaagcccgccgttgttcggtaaaaccgggaatcctgttcttctgtattcgtaccattgctgatgatctacaaaaaacagagaaatgtatttctgaagcataattctttcgaaagttccgttgtaagccacattagcgttggtaaaataattggcaggaactgtggctccccattgttcaataatcgattttactccgttttcataataagtctgggtatttcccgtaataattcctttgaaagaaagctctgcaaggataaactgaacctcagaataagtcataattaaatctttcaacggtgctttcgcaagattctggttgaaattcgaaggctgataattgaaagcacttcccaaagcatatcctgaaggagcacctttgtaaccgatgttcgcattcgttgccagatcttttgcctgtgtgaagaacatgctcattctcggatcattattgtttttcatggcattcacaaaaaattctcctgcggcacggtacgctgtaaaatcctgcggtcttgcgatcggcggaaggtaaggtgaaattcctgaaatggttaataaagcgctgtctgtattgttctggaaaataggatatgtggtaggattgcttacaatttcctgaattctttcatgaacgttgacttctccgtttcttttcagaattcttgttaacaatcttaatgataaagaattacagaacttcttccagttaacgattcccgtcacattattattggcattgtagaaaagatccgtttccgttaatgttttcgtcgtatcgaataaactgtttgctgttttaagatcatttaaaagctgaacataaatctctttctggctgtcgtatttcggggtaatgattccctgatcgatttttacggcttcagaaaaaggcacatctccgaaagcatcggtaagattggagtagatccatgcattcaagaccatggaaatcgccagataattgttgttctgctcttttttggcaaaagttctcaggtcatttacctgcttcagccatttgtaagaggtgttccagacaccgtttccgcttccttccgtcatataatatctgctgtatgtatttccttcattcggaaaatccagaccgatctgcatgatatcgaaagtgaaatcattggctctgctgtatccgtagtttgccatttcgtactgaatgggtgccagaagacttcctacagacggattaagaattttactggtatctgtattgatttcttcaaaatttctgtcgcaagaattgaaaataaaaagtgaagcaatcaaagctatgttgatgaataattttttcatttttttaagatttaaaatttaagatttaactgaaatccaacggttctggcggttggaagctgccccatttccactccgggagtaatggttgcgttatctaaagttgccacttcaggatcaaacatcgggaacttcgtccacatccatagattttttccgaaaatagctaaagtaagatcctgcagtcctaaagattttatggtttctttcgggaaagagtacgcgattcttgcatctctcagttttataaaatctgtgctgaatgtatttgtttccacgttcgctcttctgtagtattctgcataataagcagatacggtaaccgcttttgtattcgggctgtaagaaccgtccggattctgtacaactccttctcctacgatcattccgttcggattgtctcttcccggaagcgtagatttcagttttccctgttccgacattttgtgatgcgactgcgaatacgcaacaccaccgtactgaccgtcgaatgagaagcttacggtaaaatttttaattttaaaatcattctgtaaaccggctctccatttcgggaaggcgtttcctactttttctatttctgcaggtcttaaaggcaatcctgcgttgtcataaacaacctgtccctgactgtttttcaccaatttaaaaccatacatatctcctaaagaacctcctacaactgctttataaaaaaccactcctcccacggttgaaataattccgtcgaaaccttccgacgtggtgagtactctgttttcgttcgcagaccagttggctccgatcatccagaagaagcttttggttttaaaaggtgttgtatttaatgataattccatacctctgtttcggatttttcccgcgttgatgattctttgggaataaccgctttcataaggaagagaaaccggaataatctggttttcactcatgttctgatacagcgtgaaattaaaattcaatctgttttttaatacgctgaaatccatccccgcttctacgttggcatttttttcaggtttaagattaggattgttgaagatatttctcgctaccacacttcctgtgatggaactggtatcgtaataggtatctaactgataaggagaaccgtcgattcctacttttgcccacgaagctctcagtttccagtaattgaaccggtcgcttttcagtttaaaaatttctgaaagaatgaaacttgtacttacggaaggataaaagaatgatctgttggatttcggaagtgtggaactccagtcgtttcttccggtaacatccacaaagaatttattgtcgtatcccaatgttaccaaaccatagacactgtttacctgttcgtctcccggtctcggatattttacatcaattccaagcgcattggtaaggttgtattctcctgcaattttcaatccgttcgcctgataatcattcatcacatactgattgtaacggatgcttcctccggcagatgcagaaatattgaatttattaaagctctgtttgtacgaaaataaaacatcgttgttatattcgtgatttttaatgtactgttctctgtagaatccttttgcataattagcggaactccacggacgttttgttgttcttttttcgttcagcacttccagtccggatctcagcatcagactgaaatttttattgaactgataatctgccgtaatgtttccgaaaatcgtttttttatccactccgttcagcatttcgtaagcgatgaggtaaggattgtcgataaatgtactaaaagggtgaatctgatcgatctgaacctgtcccggtttccagatcggctgataccatgcaagatccacattcggattctggaagatcatgaaataggaaatcgactggttgttgtatcccgttgccggaagattgtcacttgaagttttattgaaagtaaatttggtggaaatttttaattttttggttaactgatgcgcgaacgacaaagcaaaattcagtcggtcgaaacctgtattcggcatcatccattcgttattaagataggtaagcgatgttctgaaactggttttatcattggaactctctaccgaaagactgttggaatacgtagaacctgttctccagaatcctttgatgttgtcttcataagctctccaaagctgtctttccttactctgtccgccaacggtaggatcatactgaaaataatactgtcccgcgaatttcggtccgaaagcactgctcgttcctccggtacttacaccgtctgcagaagctccgtaggaataatagaattgtcctgccgtatttttagccaaagttccctgtccgtattcgtactgccaatccggccatttcagaaccgtatcataacttgaataggaattgaaggttacctgaatttttccgtttttactttttcctgattttgtagtgatcatcaaagctccgttcgcagcacgggacccgtataaagcggctgcagaagctcctttcagaacggttaccgactcaatatcatctggattgatgctgttcagtccgtttcctaaatcaatcggaacatcccctccggaacccgctccgtacgccggagttccagttcctgtggtggaatttcccaaaggaattccgtctacaacaattaatgcgtaattattatccaataccatcgacttttcgcctcttaaagtaattctggaactggcaagcggtcccgctcctgccgtctgaactttcagtccggcaacttttccttccatagactgagcccagttgttgttctgagtttcttcaaaagtgcctgaatttactttttcggcaacatatcctaaagatttgtcttgtctcttgatccccaaagcggttaccaccacttcgtcgatgttcttaatggtatctcttttcactttttgctgagctgccagatttacactgacaagtcctagtaatgataaaatgagtactttttgtgtctctttacgcatatcctttttgtttgcgcaaaactaaaacgatattatgagtaggattttaatactattttaacatttattaaagaattattaaacgtcatattaattaaaccttaataacattgcacagccaactggttaacaagaggttaaacgaatgaataatttttaatattttaaagctgatttatttccctaattttattgtcttttcctgagtaaataagggataccacaaagttgactgaattttaaaggaagtttttaaaacaaaaaaagtccgcctcaaaagagacagactttttttataaagatggcatgatcttattttttaagctgatccggaatattggtggtgatgaaaccaattccctgcttttttaattcatcggcaatggcaacgtcattcaccgtccatgcattggtgatcaatcccaaagcttttgcgtctgcaatccatgtaggatttttctggaaaatgctgtaatggtaatcgatcccatccaaaccttcgtccttgatctgctgcggagaaagctctcctttaagatattgcactttaaaagtgggttccagccttttaatttccttacagatatttaagctgaaagaaatgaaatcgcattgcgctccaagcttcatatccttgatcattttgatggtttttgccgtcagttcatcttctttttccttggttttgtcaggctttatttcaaccaccagttttagcgatttatctttcttcccttgttttaaatagtctttcagagtgggaaaatcttcaccgttggataattttactttctcaagttctttaaaatcggtttcggaaatttccattttggcgtgatgttcgtcgtggtttaccaccaaaactccgtctttcgtcattctcacatcgaattcagatccgtaaatctttaaattctgtgcattttccaacgatttcagagaattctctgtcgtgggcggctgcgtctgccaatatcctctgtgtgctacgatctgggtttgtgccttcattactactgtgcttaaaactgcgaaccctaagataaaatttttcataatataatttgaatagtattcgaaagtctttcaactttcagataaaggtatataaatttatttaagtgaatcgtcaattgtgaatccttcgctttcaatgatcagttatttaaaattaacaattgacttgcaaagcaaaattgaccatttacattttttacattaaacttgtctaaacttttttaccgcaaaagatgcaaaagattgtaacactttagttattaagtttaatacttaaatgtaaaaagagcacataagttaaaaaaatcaaagatttttctctttgcagacttttgaaatactttaaataaactcaacaaagtcttttgtctcttttgcggttacatttaaaatgagtttaaacttatttttagattagaaagaatatttcgctccgatctggatttggtaaggatttcctgaaagtggctccagtccgcttgtattcagactgtatttaaactgttttgttgcctgatcaaatcctgtaattctgtacagtgccgtatttccgtaagatttgttaacgccccattctttgttaagtaaattggcaacgttgaaaatatccactgaaagttcaaaggctccgattttttcaaatttgattttctttgctacacgaacatcccaaactccgtagaaaccgttctttccgccgtttctttctgcaactttgttcttgtaatctgtaatgtagttcttcaaagcctgtcccacttcaggattatcaattaaagtctgcgtaagattcgggaaaatgtaagctaaatcgttcgtgtctacgaaatctccgtttacatttcctcctgccgttacagagaaacgggttccgccgattcctgcgtaacggactcctaaagtaaatcctgcaatcgttggtgaattaccataaatcacgactttgtttctgaactggttatccgaatacgtcattcttaaatttctcggatctcccgaaaccatggtagacagtgttgcagaattggctacgtttccgttatacgaagtattgtctttgatgtccgcccaagtgtaacttgctgtaatttctccgtctttccagtaacggtaacttgtatctaatacgaatgaaaactgattgacttttccatcactcaccaattccagaactcttccgaaatttttgttgattcttccgtctttccagctcagcgttccgttggctgcaatatctgctgcacgaacaaaaactcctcttcctccttcattatccagcgtaaaatacggatttgccaccatatttctgtcgtagtagaaatagttgtttcttcccaacgtcatgtatcccgcaactcccgctctgaatctctcgttgaagaagtgcgtataagaaacattggctttgtaaactaccggaatttttgcatcttttcctgtgtagttaattgtcggaagctgatactgcgctaaagtaggaaccgttccgtaatcgtttctgtagctgatgaaatccggcttcagaccaatctgtgaaggatttacatccactgttgccaaatgtcttccgtcaaacaccagattattgataatcatataattattgatgtctgaagagaaaattccagccccgaatttcaggaagtctttatttccttcattaatattccaatcgaactggaatcttggctgaatgataaatgatttgatctgattatctgtccggattcccatttcatcatataatttctggttgaagcctgctttcggataaccgccgtaatccaatcttaaacccgccattaaatccagaccttttgcaatttttgtctgaatctgtccgtaaactcccaagttataaatattggatttcacggaaggatcttccatcaaaggaacttctctgtaaaatctgtacgccacaagattattaaaattaaataaattatctcctccgttcacagtaggattttctctgaagtggaatcttccgttcacttcacttccatacaccgattttgccatcgtatacattaaatctgctccgaatgtatatttgattttatccgtattgtagtataaattgtctacgatctggaaaacattattcctgaaactttcctgcgcaaaacggtgacctccgatctgaatattggttgccttgtcttttccgtcgatgctggttacgatattttcgacaatggctctcggtacgggatgaccaagctgatcgttttggtaactgtcctgaaacgtgtaaagatactgcgccttcagttcgttcgtcatattcggttttaagtttgatcttaaagtcaatagcaaactgttatccagatttttatcatttccataggattcaaaagcgttgatcgctgtgttgtctcccaaaccgtttttattgagatcgtaggtgaagttatttcttaaagtcaataagtttttatcgttaatctgccagtctaaacgcaaaaatccggcatcagaatttctcactttatcaaaacttccgaactgcggtgtatttccaacgccatattttgctctggcaatgtcaaggaatttatttaaagtagcttttgtggtatttaacctcaattcgtcgtcatgagatttgatatcggcaatctgcaatggtcttgaatccaactgatgatcccatgcaacgaagaaatgcagtttgtttttgatgatcggcccgcctaaagagaacccaaactgggaagtagaaaaatcgttgttgattttatttcctctgatgtcgtatttgctggaaagccagtttgtcctcaaatattcccatgcacttcctgaaaatttattggttcctgattttgtaaccgcacttacggttccgcctccgcttcttcccaatgtgacatcatattgattggtggttactttaaattcacgaaccgcttcgatggaaatagaaaaaggagcattacttctgcttgtggtagaacctgcagatgtaggatttttcgctgtcattccgtcgatggtaaaattcgtggaagaacccaactgtccggaaatacttccgtttttaccgctcaacggcgaaagttcagcaaggttgttgaagtttcttccgtttacaggtaaaattccgatatttttggttgtgatggctgttgccgcacctaaattcccgatcttgttttttaaatttccggtaacaaccacttcttcaatgcttttctcgcttcccaaatctacgtttaccgttacctgatctccaaaatttacattgtagccttcccttttttcatcatttacgaataccgtataagggccgcccaaaggaatttctttgaaaatatattcccctttcgaattggtttccgtttccgttttaaaacctgtggattcatttacaatggttacttttaccttttcctgtggagcttttccggttccggtaacttttcctacaatggaagcctgagtggtctgcgcatacgcaagcgttccaaaactcaggaacaatagtcccaatacaatctttacttttctcatatctacaaattagctttgcaaatgtattttgactttcaggatcctctgtttaagggagttttaacattttttaaattatatcggaacattatgttaaataaattttaacgccgaatttatctgatggataatcagttggttgaaatgtgttacaactttttaattttcgcggaatatttaattcccttattttttaaattggaatttcttttatttatttttgctgaaaagataaaaacccgatgtccgaaaacatacaacaaaaaatagaagatctgcgaaaagagcttcatcagcacaacgaaaattattatctccttgatactccgacgatttcggattatgattttgatatgctgctggaagaacttcgtgatctggaagcaaaatatcccgaattttatgacgaaaactctcctaccgttcgtgtcggcggtggaattaccaaagttttcccgacggttcagcataaattcagaatgtattctctggataattcttatgattttgacgatcttgaagactgggaaaaaagaattattaaaaccattgacgaaccggtggaatttgttgccgaactgaaatacgacggtgcttcgatctccattttgtatgaaaacggaaaactggttcaggcagtaactcgcggtgacggttttcagggtgatgaaataacggcaaacgttcgtaccatttcggatattcctctgaaactgaaaggtgattttccggaacatttttttatgcgcggtgaaatttatttaacccgaaaaaatttcgataaaatcaacaaacagcgtgaggaagaaggtctggatccgttcatgaatcccagaaatacggcaagcggaagtctgaaaatgcaggacagcggcgaagtgagaaaacgtgggctttcatcggttctgtatcagtttatttcagaagatattcctgcaacatcgcattgggaactgcttcagaaagcgcaaagctggggtttcaaaacttctcagcaggcaaaattatgtacgactttggatgaggtgaaggaatttatcaatttctgggatgtagagcgtcataatttaccgtttgaaattgacggtatcgttttaaaagtcaactctttaaaacagcagagacagcttggatataccgcaaaatctccacgttgggcaatggcttataaatttaaggctgaaaaagtggaaaccgagctgcaaagcgtttcttatcaggtcggaagaacaggagccatcactccggttgcgaatctgaaacctgttttattagccggaacaattgtgaaaagagcttcacttcacaatgaagatattattaaaaagttggatcttcatgaaaatgatttcgtttacgtagaaaaaggcggtgaaattatcccgaaaattgtcggcgtcaataccgaaaaaagaacggaagaaagcaaggaaattgaatacattaaaaattgtccggaatgcggaactgagcttgtaaaaattgaagatcaggcaattcatttctgtccgaatgatcttcactgtccgccacaggttgtgggaagaatgatccattatgtttcgagaaaggctttaaatattgataatctgggaagtgaaaccatcgaacagctttacagagaaagattaattgaaaatccggcagatttctatgttttaacaaaagagcagcttcttccgcttgaaagaatggcagaaaaatcggcacagaacatcatttcaggaatcgaaaaatccaaagaaattccgtttgaaaaagtactgtacggaatcgggataaaacacgtcggagaaacggttgccaaaaaactggttaaaaatttcccgaccatcgaagatctgaaaaatgcaacggtggaagagctttgccaagtagaagatatcggaaccaaaatcgcggtaagcatcgtggagttctttgcaaattccgaaaatattttgatgatcgaaaggttaaaatcttacggagtacagcttgaaaaaggcgaaagtacgaacgaagtcctgtcgaatgttctggaaggaaaaacattcctttttactgggaaattatcattatttaccagagaagcagcagaagaaatggtggaaaaacacggcggaaaaaatatttcggcagtatccaaaaacctgaatttccttgttgtgggcgaaaaagccggaagcaaactgaaaaaagcacaggacatcggaacaattgagattttggatgaacagcagtttttggatttggtagaaaaatagtgaaaattataaaaatatttaacataataaaccattgagattaattttcaatggtttatttttgcttttaattaaaaaaataaactaacaactaataatacatgagaaaaatctatttaatcatttgtatcgttttatgtgctgtttttcaggcacagattgtgaatattccggatgcgaatttcaaaaacattttactcactaactctacatctttcgcattgaatatcaatgattttcctacagttattgatactaatcatgatggagaaattcaggtgaccgaagctgcaaaaataaagtcgttaaattttgataaaatgataatccctaattcctcttattattttgataatatcgtttcaatggaaggtattaaaagttttaccaaacttgagagtcttaggattaataactttcttcttttaacatctcttgatattagtgataacgtctacttatataaacttgacatctcccaatgttatgcactttcatcagttaatatccaaggttgcagccaattatacgatcttgatattttcatggcaaaccttccttctattaatctttccggtttaacaaatttatatagtgctgatattcagttatcacaacttaataatatttatttaaataataatattaatctaaattcattaaatctggcagtgaataatcttcagtcacttcccgtaaaccaaacacctaatttagaatatttaaatatttttaataataaatttacaacgcaggatttcagttcttttccacaacttttagggattagatgtacgactaataagtttacaagcattgatttttcccaaaatccaaatctggcgacttttttatgcgattcaaatccctatcttcaatcattgtttataaagaatggtatcaacaattttaccccaaatagtaattcaactttttccaacactcctaatcttgtttacatttgtgccgatgattcagaaatatcgaatgtaagcgctttattaccatctggaagttcctgcgtgataaactcttactgttcttttacaccgggtggagtaaattataccattcagggaaatacaaaatatgatggtaacaataacggttgtgatgttaatgacagtaataaagcttttcagaaattcaatattaccaacggaacagtttcgggaagtttaattgcgaatgcatcaggaaatcattcaattgctgtaggtgctggttctcacacaataactccggttattgaaaacccttcttatttcaatatttcactcgcaagcttaacagcaaattttccaacgcaaacgagtccattaatacaaaacttctgcctttcagccaatggagtacacaatgatcttgaagcagtaattattccgattaatgcggcaagaccaggcttcagtgcaaaatacaaaatcgtttataaaaacaaaggaaccggaacacaatccggaactttatctttcaattataatgataacctgatggatttctcaagctcatctgtcacggtaaattctcagtcaaccggacttttaaactggaatttcagcaacctgaatccttttgaaaccagagaaattacagttacttttgctttaaatactcctacacaaactcctccgttaaatggtggcgtggttcttaattatacgactcaaattaatggagcaacggacgaaactcctctggataatacatttacgttaaatcagactgttgtcaattctttcgatccgaatgataaaacgtgtctggaaggaacttccattacacaagcaaaagtaggcgactatgttcattatgtgatcagatttgagaataccggaactgcaaatgcgcaaaacattgtcgtaaaagatgagattgatacctcgaaatttgatctgtccacactaattccgttaaacagcagtcataactttataacccgaactaccaatccgaataccgtagaatttattttcgaaaatattcagcttccttacgcggcaggaaataatggcggatatgtttcatttaaaattaaaacaaaatctacattaaatattggagacagcttcagtaatactgcaaaaatttattttgattataatgctccgattgtgaccaatacttacacaacaactgttcaaaacgtattgtcgacgtccgaaatgacatcaaaaaacaatgaagtttcgatctatccgaatcctgtaaaagaagttttaaacattcagtctaaaaatgaaattgtaaaagctgaaatttacgacgcttcaggaagaatattaagttcagcatcggtaaaaggaaattcaatgaatgtttctgaacttgccaaaggaaactacatcattaaattatccacaaaagataaaacattcgttcagaaattcactaaaaattaaactgatctgaatactattacaaaagactgtctttcaaaggcagtctttttttagctgtgttccaaaatatatagagcgtccgaaatttcgcttgcaaatctttcatccctcttttcgaaatagtagaaaccttcttcaagacttttcgcattttctttaatccatttcagaaatttttcatgatctgattcatcgaaacttttatttttcaggttttcgttgataaaatcctgataataataccggataaaatctacataaatcataaagctgttttgggcaatatccactttccagtaatctaataatttttcaatttcactggtcacattatagattccgaaaaataaagcatcatcaaaaaaagtcctgttttctaagaaatacttccaccattccaaaagaaaagtgataaccgcttctttttcagcatcattccagacttcccattttccgtacttcagctttccgaagataccaaacggatgaattcccagatcatgatcgatacaaagctccagtattctcggcaggaaatgtttaaaatcatccacatttccccacgtggtaattgctttgaaagcatatcgggaaagatcctcttcttcgagttctctgtgttccttactatgaattttctctttgtcacgatccgaaatacaacaggggcatccctcgataacagatcggatttcatattttgaaaaaacagaatacaggttttcaatcgactttttcagactttcattcaatggtttagcattttagggtacaatatacctcatttgaatttttatcaaaagatttattgtaattttatttagtaaaatcttcaaaatggaatttttaaaagatcattacgtcatccagaacgagcttctgctgatcttcatctccgttcttctcggcattttcatagggacagaacgcgagtaccggaataaatcggcaggtttgcgtacttttattctggtctgtttcggatcctgcctgtttacaatactttccattaaaatcggagttgccaatccggatcgtcttgcagccaacatcattaccggaattggctttctgggagcaggcgttatttttaaaggagacagcaaaatcgacggaattactactgccacaactattttcgcaaccgcctccatcggaatggcagtcggatccggatatgtatatctttcccttctcggaacgcttcttattttattggttttgaattatttaacctattttgaaaaatttatagacagacaccataaaatccgggagtataaaattgcagtcgtcaattatcatgatattcagcactgtgaagaactttttaagaaaaacaatctgaaattcatcctcgcaaaacagcagtacacacagggaaatttatcgacaacatgggtggttacaggcaataataccaatcatgaaattttaatgaaaagcctgatggaagatgataaaataattgcctatcagttttaatatcatcaatgtcaataaaaaatcccttaagatgagggattttggaaattattagattatttctttttaaaaatataaagagctttattgggaccgtcaatcggttttccttccatatcaagctgtgtaagtgtattttccccaactttatatttgtattttgaaatttttccgtttaaggtaatgatgcttccggaagaatcccatgcaaacgtgcctgtatcttcatttttagaatttctttccagatattcttctgtgattttaaaagatttatccttacttaaaacaaggatggttttaattccgggacagtctgcgcatggaactgtggcttcatacgttccgtcccagtccaaagaattttctgaattatcagcacccgcaactgaatttgttttggtactgtccaccggagcctgaatcgccatcggatctgttttagggttcacttcaggatttttgtctttttgcgtacaggaaaccacaagcgacgcaagagcaattcccagaatctgaattgtttttttcataataaatgatttagcgtgaatgctttttcagcagcaaaaattaagccgcctgatagtttcttgttgatggttgacagatcaaaatgattaaagattaaagattaaaccttatcgtcaatcctgatacaaaaattttatttgtttttacttttctagaataatcgttatgctgaattaaaattttgtttttgaaaataaaagaatcataaaatattaaatttgaacagcctctaaaaaaacaatcaactatcagccaattttaacccaaatctccctttttctttgtaaattggggcaaaattttgattatgacaaaaaagatacttctatctgtatttcttttgccggctgtaatgacgtttgcacagcaatacggcggaatgtggattccaacggagcttaatgaaaaggaaatgaaagatttgggaatgaaaatctctgccaaagatattttcaatccacaaaaagcaagcataaaagatgcggtagtacagttcaacggaggctgtaccgcagaaattatctcaccaaaaggcttattgcttactaaccatcactgtggttacgggcagattcagtctcattcaaccgtgcagaatgatcttttatcgaatgggttctgggcaaaaaatcctcagggagaacttccgaatccgggagtaacggtagactttattgttgatatcaaagaagtaacttctcagattttagaaggtacggataaacttcaggaacccgaactttctaaacagattgccaaaaatattgagatttacaaaaactctcagaaaacagaaccttatcagtcgatttctgtaagatccatgtattacgggaataaattctatgctttcactatcgaaacattcaaagatatccgtttggtaggagctccgcctcaaagcatcggaaaattcggttcggatacagacaactgggtttggccaagacataccggagatttctccatgttcagaatttatgctgataaaaacaacaaaccagcggaatattctaaagataacgttccttacgttccgaaacattatcttccggtttccattaaagataaaaacgagaatgattttacttttgtattcggatttccgggaagaaccacagaatatcttcctgcaattgcggttgaaaagatcatgaaagataccgatcctgcgagaatttcagtgagagatgttgctttgaaaacattggacgaaaaaatgcgtaccgatgatgccacaagaattcagtatgcttcaaaatacgcttcagtagccaattactggaaaaaatggattggagaagtggaaggtctgaaaaaatctaacgccgtagagaaaaaagtacagtatgaaaattctctgatcgctaaaaataaagacattaaaaccactttagatcaactgaacaaactctacaacgatcaggctccttatgcattaaataacgcatattattctgaaaccatcagaaatgcagaaactttaatgcttgccaatcttttctacaactacattactgcggtagaagccggaagaatggacgaaaaaggaaccgcttcttttaaaaacagactgacttctttctacaaagattacaatgcagaacttgatgcaaaagttacggcaaaattactggctctttatgccaataaaacggctccggaatttttacctgcaggatttgaaaaatataaaaatgaagcacaaaatcttcagaccgttgaagaagattctaaaaactccatcatcacaggaagaactgaagtaaacggagcttctctgagcaaagatatcgacaaggcattctccaatcaggacaaactgatcaaaacattgaaaaaagatccagtttacctgacttatttatccatgagagacacctacatcaccaaagctgatcctcagtttacatcgatgcagacaaaaattgatgttttacagaagacttacatggctcagcaaatggcaacagataaagacagaaaattctttccggatgcgaactctacgcttcgtgtaacgtacggaaaagtgaaaggttcttctccgagagatgccgtttcttacaattatcagacgcatttggcgggtgtaatggaaaaatatgttccgggagattatgaatttgatgttccgaaaaagctgattgatctttacagcaagaaagatttcggagtgtacaaagataaaaccggcgatgttcctgtaggatttacagctaccaaccacacaacgggaggaaactccggaagtccggctcttgatgccaacggaaatctggtaggactgaatttcgacagacaatgggaaggaacaatgagcgacattaattatgatcctcgtttcagcagaaatatcatggtggatacgaagtatattcttttcatcatcgataaatttgcagattccaaatggctgattgatgaaatgaagattgtaaaataatttttaaaacatatttaaaagagtctatttaaatttttcaacggatttaaatagattctttttatttttgacagatcaatgaaaagaaaaatcattaattttttgtcagaatttgaaaatgggaatgtcgaaaaatcatttcctctctcttactttttacccgtttaccattgtgtttccgatgaaaatctgcctcatcttcaaaatatcattcaatataaaaatgtaaaacagtttgagcaggatttagattattttctgaaatattttcagtttgtcaactggcaggaattcaaagattttatcaaaggaaattttaaaccgaaaaagaagattgctttgctgacttttgatgatggattacgtgagttttatgacgttgtactgcctattttggaaagaaaaggaatttatgcggttaactttatcaatcctgaatttattgacaataaaaacctgatgtttcgctgtaaagcaagtcttttagttgataaaattgagaaaaaaaacgatataaacccaaaagtcttcagcgttcttaaaacaaaagaaaatactatttctgaaattttaaaaatcagctatttacaacaaaatcttttagaccagcttgcagaaattttggaaattgatttcaattcattcttaagtcaacaaaaaccctacatgactttggatcagttaaaaagtgttacggaaaaaggattcggaatctcctctcacagttgggatcatcctttgtaccatgaattaactattaatcagcaacttgaatcctgtaaccgaacttttggctatcttaagcagaatgattttttatatgaaagttttgcttttccattcaccgattttggagtaaaaaaagctttttttgatcagttatttagaaatcccgaattattttgcagctttggaagcgcaggaattaagctcgacagtgttcctcaaaattttcagagaattccgtttgaaaaaggcgaaacggctgaaactactttaaaaaaagaaatgacctactttaaactgaagaagatttttaacaaaaataaaatttcgagaagatgattaatctgaaaactttaaaccgaaaaaaacttgaagaattcatatcatccggcgattataaaaagtatgattttctgcctattacaaaacatcgcgctatttcccacattagaaatccaaaagctaatgacgaagatattctattgattctcgcatttcataacgatcagttggcaggttatttagggtgttttcccgatcattttatcatcgatggaaaatcttttaagtatgcatggctcagtacccttttcatcagcaatgagtttcgcggaaagaaaattgcacagactttattaaatacagcctttgaagaatacgacggaaatattgccatcacagaatttacaaaagaagcagaaagtctgtataataaaattggacttttccggtacattcagcctaaaaaaggaaagagatattatttcaaagcagattttgcaacgatcattcctacaaagaagtctggttttaaaccttttcagccggtttttaaaattgcggatagtttcatcaacacgctattatcgtttagaaaaatttttatccaaaagcctgattttaagtctgaaatttcagataaaattgatgcggaaagttcagcatttctgttggcgtttaaaagcaacagaacgccttatgaaatcaactggtttattgaaaatccatgggttctggaaagcgaaaataccgaaaaagattaccttttttcagcctattcaaaacaattcagatatttctggataaaaatttatgatgaaaataacaatttggaaacctgttcgcttctgcttctaagagatggaacgcttaaagttttatatttattttcaaaaacagaattaaagaaatttgttgtatttctgaatgatttcattgtgaaaaataaagtgaaggttctaacgaattatcatattgaacttaatgaaaatatcgcttcttcaaagcagtttcagaaaatttatcagaaagattttgaaagaagttatatgttccataaaaatttacttgctaatctgccggaagattttgatccggattttcaggatggagacggagattgtgcaatgacctaaaacggaaagaggcttttttcaagcctctttttttaatgtccgaaaatatcttttaaactcacttccctgaaggttcccatcttatcaaccgcttccatgttcaggttttcttttttcccgataatggcagtgttgaagtgaacggattttatgtaatgatcgtaaaaatctttcagatcttcaaatttcaggctttcaatctggcgatagatatcttttctgaaatcatgatgaatattcagttttcttaatcttaacgtattgaagaaaatattcgttctcgttacccgttgcgaagcaatctgtttcaaagcagaattttttgcattttcaaactgtactttcacttcaggaagttcagtcatcagttcagtcatcgtatccaccgcaatctgcaatttgtccggctgcgttccgatgtaggtggtaatgtaatccggatgatccagctctgaattcgctgcgtaagaaacgtatgcagaatacgctaaacttttgctttcacggatttcctgaaaaacaatggatgacaaaccgcgtccgaaatattcattaaaaacattgattttaccaaaattttctgtgttgacattgcgacctcttcctaccttactcatttccatctgaaccatatcgtaatctgtaaaatatacatttccattggtttccggttccggatagtttttaggctccggaatgacaaaattttcattttcagtatattttccgatgtatgaagtgaaattttcaaaatttcttccgtagaaaaatatctgatacggatatctgaacagttttttcatacggtctgtaaaaacttccacattgctgctttccaactcttcttttgaaataacatccgtaaaccgtgagaaaggtcccaatttggtataattcgtaagagccgtcataattctgcctttatccttcttcatcgcagcacggttttccagaatagtttctgtaaactgtctgtaaatttcctgatccggttttacttcatacagccaatgctgcagaagatctattcctttttcaatgttttcttccaagccgttcagcgaaataattaactgatcgttggtggttttaaaatcattggtaacgccgattttgaagaattcttttttcagatcttccggagagaatttttcagttccaagatattgaagaacctgagttgaaattcccagatcgcggtcgtgatcgcttccgaaaggaaaaataaaatgaatctgcgcaatatcgttgtatttatttttaacaaaactgatggtcttgcctttcacaaaatccttctgaatttccttttcataatccacaaattccggctgaatgtcttccgttttttcttctaaaatctggtgtaaaaagtcagactgggcttcacggtttattttcacaggagtaattcccggattttctacgcggatcaatttttcgtttactcctttttctttataaacgatcacataattatctctgaaaaactcattggcaaaggcgataacctcttctttagtcagtttttcatactgatccatttcattcagttcctgttcccacgttcttcctttgatgtacgtatcataaaggtttgttgccaatccgtctgcggtttccagcgctttcatcctctgaattttaaaatcattgatgatggcaggaagcatccagtccggaaattcttcttttttaaccagttcgatctgctcaagaaccaaatctctggcttcatccaaagtctgcgattccttcggaacggcaacgatggaaaaatatccgtactgtttcagacctactgaatacgcctgtccccacaataatttttgagtctgattgatattcagatccagcaatcctgcttctcctctattgctcagaatattcaccactacatccgccaacatcgcttcttttgtgccgtaactttctgttctccacgccaattgtactctcggcgttgtaggactttttaccgttcgttttataatttccgtaatcggtttttcgataatgggcgtttttttcggaagttctctgtaaggaatggttccgaaatattgatcaacaagttgaatcgtatcttcaaaatcaagatctcccaccaaaaccatagcataattgttcggaacataatattcatcaaaatatttatgaatcgccttcatggaaggatttttcaggtgttctgcctttcctaaagtcgtttgctgaccgttgggatgcgtaggaaaaagtgcgtccatcagttcataatttaccagacgcgaatcgttgtcctgtgctctgttgaattcttcataaacagattccagttcggtatgaaaaagccttaaggccagttcagaaaaacgttctttctcgattttcagccatttttcaagctcattgttcggaacattatttttgtaaaccgtttcatcgaaccatgtatgcgcattggttccgcttgcgcctaaagaagaaattaccttatcatattcattcgcaatggcatactgactggcttcctgagaaacttcatctattttgcggtaaatttctttctttttttcaggatcattttcagctttatgctgttcgtataaatctgaaatctgatctaataattcactttccttttcccagttttgagttcctaatttagaggttcctttaaacatcatgtgttccagataatgcgctaaacctgtattatcagaaggatcgttattgcttccggttctcacaggaatataggtctggattctcggagcatcagaattttgggcaagaaaaacctttaaaccgttttttaaagtgtatattcttactccattttcgtcattggaaactgtgatatattcgtagttatttttatctgtatgaatttcttccctgaattttttatcaatcataaacttcatttttcacccttaaaaatagaatgaatacaaatgtaagcaatcaaaaaagaatccttccattttataaatattaaaatctatgattaagattcgcattttatatttaagtttgcatcagttttccaaattacaacaccatgcaaggaaacatcctcatcatcgatgacgagatcaagctcctgaaattattaggaatgatcctttcccaagaaaattttaacgtaaaagaagcttccaccgcacgttctgcgatgacgatgctcgaacagtatgaatttgatgtcgtgctgagtgacgtaaggcttcccgatgctttcggagtagatttagtaaaatccatcaaaacaaaatatcctcatctggaaattattctgatgacggctttcggaaatattacggacgcagttcaggcaatgaaaaacggcgcctacgattatctggtgaaaggtgatgataatgataaaattattccgctggtttataaatctctggaaaaagcaaaagataacaggtcgaaaatcattcagaagagttcttcttcaaaaggttttgaaacgattatcggaaattcaccttccattattcaggcaaaaaaactggctgcaaaagtagcgttaaccgatgcaaccgttcttctgacgggcgaaaccggaaccggaaaggaagtttttgcgaatgccattcatgaaggcagcgacagaaagaaaaataattttgtcgccatcaattgttcagctttcagcaaagaaattctggaaagcgaacttttcgggcataaagccggagcttttacaggagcagtaaaagataaaaaaggactggtggaagaagccaatggcggaaccctatttctggatgaaatcggagaaatgccgatcgagcttcaggcaaaactgcttcgtgtactggaaaccaaagagtttatcaaaatgggagaaacgaaggtttccagatcggatttccggctgattgccgctacaaaccgtgatctggaggaagaaataaagcagggaaacttccgtgaggatctttatttccggctgaatatctttgaaatcaggcttccgtcgcttcgcgagagaaaagaggatctgaaagctctggctaaaaattttgtgaatgttttttctcaaaaacttcatatccccaatattgaaatctctccggaatattataaaacattggaaaaaaacgactggaaaggaaacatacgggaattgagaaatacggttgaaaggagcttaattctaatgaacgatcatacccttgatgcagaaagtcttccgcgttactctgaaaaggcttcttccgaaaacgattctttcagcatgaaatctctggaaaaagaacacatcctgaaagtgcttcaatacaccaaaggaaacaaggctgaagctgcgagattactggaaatcgggattgctaccttataccgcaaactggaagaatatcatttgagataaatgttaattaaaatccatgctgtagatactggagcattttatttacaacaataaataattgattatcatttaattataactaattttaaatacattgagaattaaaccattaagttttcagtttagaagttaagattatatgagagaagcttcgctttaagctaaaaaatgccttcaaaaatataaaggaacatagttttagtctgtttttttaagaaagaacttattggttaaaaaataaaacctatcattttaataacgagcctatcattttgataggcttttctgttttttggcatatgatgaaacttcaataaaatactcatttacaattaattaaattattttacagaacattggaacttcttttggcattgtcagtctgaataaaatatttataaaatgacaatttcaagaaaaacgttcagagaacgggagcgctcaaaactgagtctgctgatggtatcttacgtagtatttactttattaaccttaattgttgccgtatgatgttggtagttttaattcttctcagcgccttattattctgggtttcttacaaatccgttgaattttttgataaaatataaaaattatgtggagcttatttttcctatccgttatcgcctttgtgtacatctgctatgtattaataaaacctgaaaaattttaaccaaaaataatgaacacagaaattttaggcattattgccatgttcacgattaccttagtgattggtatttttctcggaaaatatattgctaatgtatacggctacaaaaaaacctttttagacaaaatttttcagcccgctgaaaatctgatctataaaatctcaggcatcaatccgaaccgtcaaatgacctggaaacagaatatgtttgcgatgttaaccatcaattttgtatggtttattcttgccttttttattctgctgaatcaatcctggctccctttgaatccggacggaaatccggatatgtcgccggatttagccttcaataccgccatctcttttttagtcaactgtaatttgcagcattattccggagaaacgggagtcagctatttaagtcagttgtatttaatgttcttacagtttgtctctgctgcgacaggaatggctgcaatggcagttctattcaaagctttcagagataaaacgacaactgaactggggaatttttacgatttcttcaccaaatctgtgatccgtattttattgcctttaagcattgtggttgcttttattctttcatccaacggaagtccgatgactttcgaaggaaaagaccatgtgaccactctggaaggagccaaaatggatgtttcacgaggtccggttgccgcttttgttgccatcaaacatctgggaacaaacggaggaggattcttcggagccaactcggctcatccgttagaaaacccgaattatacgaccaatatgacagaaatgattgttcagatgattattccttttgcactggtttttgctttaggattttatttgaagaaaagaaaactttcctggacgatttttgccgtcatgacgattggttttctggctttaaccattccaaatgttattaacgaaaccaacgggaaccctctgattacccaaatgggagctgattctcatcttggagccatggaaggcaaagaaatacgtttcggaagtgctgcttcagcgtactggagcattgctacaaccgttatttcaacaggatctgtaaacgcgatgcatgacagtacgatgccgctttcggggatgaatgaacttcttgccatgatgatcaactgtttctacggcggatgcggagtcggaattctcaactatttcattttcatcattctagccgtattcatcagcggattaatggtgggaagaacgcctgaatttttaggcaaaaaaattgaagctaaagaaatgaagatcgcgatgattgtagctttattccatccttttctgatcttggtaggaacagctttaacagcttatctgcctgaattcggagccaaaacgctgaataatcccggtttccatggctttagtgaaatgctgtacgaatttacctcatcatccgcaaataacggttccggttttgaaggtttgggagacaacacaccatggtggaacatttctacaggaattgtgcttttattatcaagatttatcccgattatcggtccggtagcaatcgcaggattactggcacagaaaaaatacattcctgagagctcgggaacgctgaagacagatactgccactttcggatttatgacattagccgttattcttctgatcgctgcgctgtccttcttccctgcccttactttgggtccgattgcagaacagcttcagtatttttctaaataaaaaattaaataattgaaccgttaagacttatttaagacgttaaaaaaattaagcttatcaaattattaagtttaaaatattctttgaatttcttgattaaacttcgctttttaaataaatcttaatgcttcaaaaaagaaaaatttaattcaaaatcaattcaaaccattaagcagattatataaagaaaactagtctcaattttcatccatacccaactaatattatccatttttattctttaatattaatttgctttaatggttgattttggtttccaatgatataacactttcaaaacaaaatgaaaaatcaatctcagacattgtttcaaaaagatttggtaaacgaagccatcaaacagtctttcgtaaaactgaatccgaaaatcatgtttaaaaatcctgtcatgtttctcgtagagatcggaacggttgtcatgcttattgtaagcctgttcagccttaccggagataagtctcaaggcagtttcagctataattttttagtattcatcatcttattttttacggttttattcgccaattttgccgaagccattgccgaagcgagaggaaaggcgcaagcagatactttacgaaaaacccgtgaggaaactcccgcaaaagttgtcgtaagcaacaaacagggatttcaggtagaaaccgtaatgaaaaaatctgccgaaatgaaaatgggcgatattttcctttgcgaagccggagaccagatcccgatggacggagaaattatcgaaggtcttgcaaccatcgacgaatccgcaatcaccggagaaagcgcacccgttatccgtgaagcaggaggagacaaaagttccgtaacaggcggtacaaaagtactttccgacagaataaaagtaaaagtaaccaccaaaccgggagaatctttcttagataaaatgattgctcttgtggaaggtgcttcccgacagaaaacacccaacgaaatcgcattaaccatacttttagcaggttttacgcttacctttattatcgtaaccattaccctgaaaccttttgcagactacgcgcagacaccgattaccattgcggcatttatctcacttttcgtttgtttgattcccacaacgattggcggtctgctttctgcaatcggaatcgcgggaatggacagagctttgagagccaaagtgatcaccaaaagtggtaaagccgttgaaactgcgggagatattgatgtactgcttttggataaaacaggaaccattaccatcggaaaccgtaaggcaacccaatttcatccttcaaatggaattcagcttgatgaattcataaaagcttcggcactgagttccgttgcggatgaaacgcccgaaggaaaatcgattatcgaattaagccagttaaaatccgaagatttacttgttcccaatccggtttatattgattttacggctgaaacccgaacttcaggaatcgattttgaaaacacaagaatccgaaagggagcctatgacacgattaaaaaactgacagaaaaagcgggaaatattttcccttccgaaacacaggaagccgttaccagaatttccgaaaacggaggaactcctctggtggtttctgttaatgaaaaagtctggggcgttatcgagcttcaggacatcatcaagaccggaattcaggagcgttttcagaggttaagaaaaatgggtgtgaaaaccgtaatggtaaccggagacaaccctttaaccgcaaaatttatcgctgaaaaagcaggagtagacgattttatcgccgaagcaaaaccggaagataagatgaactacattaaaaaagagcagcaggaaggaaaactggtcgccatgatgggagacggaaccaacgatgctcccgcgcttgcacaggccgatgtgggcgtagcaatgaacagcggaacacaggcagcgaaagaagcaggaaatatggtggatttagataatgatcctacgaagcttattgaaattgtggaaatcgggaaacagttactgatgacacgcggaacgttaacaactttcagtattgcgaatgatgttgccaagtattttgcaattattccggcattgttcatcacgtttattccggcgcttcagaagctgaatattatgaatctccacagccctgaatctgcgattttatctgcgattatttttaacgccatcatcatcccgatcctgattcctttagctttgaaaggagttgcttataaaccgatcggagccagcgcattattgagaagaaatctcttaatctacggactgggcggaattattgccccattcatcggaataaagctcatagatttagttataagtcttttttattagactggaagttttaagctggaagctggaaatggaacgtaatattttaacttccgtcacccttcttcaatcttccttctactcaactcaaaaatttaattcaaatgaaaaatcatattttatcagcatccagacttacattggtgatgcttgtaattgtcggaatgtacttaggaattgtctacgcaggttctaaagttttaccgactcagggaaatgcagaaattattaattttaaaggacagaaattttacgccaatatcggacagaattttaagtcttcgaagtattttcacggtcgtccttctgcggtagattacaatgcggcaggaagtgcgggaagcaataaaggaccgagtaatgaggaatatcttcagaccgtacagaaaagaattgacactttaaaaatgatgaatcctgaaatgcagaacgcaaaagtacctgtagaactggtaacggcaagcggaagcggacttgatccggatatttctccggaaggcgctttttatcaggttaaaagagtggcaaaaaacagaaatatcagttcagaaaaactggaacaacttatcaaaaatcaaacagaaacatctattttcggtccgtcaaaagtaaatgtattgaaacttaacattgctctggatcagcttaaataaagtaaaattttatgaaaaaatatattgcggcattcttacttgcaggatttttcttaccgaaggcacaaaacacagactctgcaaaaaccgataccaagctgaaaatctctgcttatgctgaacttttttacacctatgatttcaatgaaccttccggaggaaaccgccagaactttttgtacagctacaacaggcacaatgaagttaaccttaatttaggattcatcaaagccaactatgaaaacgacaggatgcgcgccaatctcgctctgatggcgggaacttatgcacaggataatctggctgcggaacaggacgctctgaaatatgtaaatgaagcgaatatcggaattaaaatttccaaaacaaaaaatctgtggattgatgcagggatcatgccgtcacacattggctgggaaagcgcaattggaaaagataacgttaatcttaccagaagtctcgccgcagaaaattctccctatttcgagaccggagctaaagtttcttacacttcggataacggaaaatggtttctgagcggtcttgttttaaacggatggcagagaattgcaaaagctgaaggaaataaaagtctttctttcgggcatcagattacttttaaacccagcgataagattacactgaacagcagttcattcataggaaacgataaaccgaaggatgataaaagaatgcgttacttccatgatctgtacggaaattttcagttgacggatcatttctcaacgacgttaggttttgatatcggagccgaacagaaagaaaaaggaagtgaaagctacaacctttggtattctccaaacgtattgatgaagtatcagtttgacgatcagtggagtcttgcgggacgtgtggaatatttcagcgacaaaaacggggttatcatcgctacggaaacgcctaatggatttcagactttcggatattctttaaatgtagattatcagatcctgaaaaatgtggtcttccgtacggaagcgagaggattttcttctaaagatgccatttttgtaaaaaatgacaatttaagacagggaaattttttcatcaccaccagtttagctgcctggttttaagagaaattattaagtctaaagcaggaaacctcacaggttttaaaaacctgtgaggtttgtaatgactttgataacgatgataatcctttaaaataaaattaaaacaataaaagccatgtcttcttcagcaaaagattttttagaactcatccagaaatccagaaaagggaaatttaaaatctacatcggaatgagcgcgggtgtaggaaaaaccttccgtatgcttcaggaagcgcatgctcttttgcgaaacggaattgacgtaaaaattggctacattgaaacccacggaagagaagaaactgtcgctttaacagacggaatccctgaaataccgagacggtcttctttttataaaggtaaaaatctggaggaaatggatcttcagactattattaatacccatcccgaagttgttttagtagacgaactggctcacacgaacattgaaggttcaaaaaataaaaaaagatggcaggatgttctggaaattctggataatggaatcaacgtcattagtgcgatgaatattcagcatattgaaagcctgaatgaagaagtaaaaaagatcaccggaatagaagtctcggaacgggttcccgataaaattctggctttggcggatgaggttgtgaatatcgatttaaccgccgatgaacttcttacgcgcctgaaagaaggaaaaatttacaaaaaagagaaaatccaaaccgctttaagcaatttttttcagagcggacatattttgcagcttcgggaactggctttaaaagaagtggcaacccatgttgaaagaaaggtagaaacggagatcaaaaccgagaattttaaacccataaaatttcttgcctgcatcagcagcaatgagaaaatagccaaaaatataatccggaaaacggcaagactggcaagttattacaacagtccgtggaccgttctgtacattcagaaaccatcagaaaatcctgaaaaaattgccctgaacaagcagcgatttctgattaataattttaatttagctcaggaattgggagccaaagtgatccggcagaaggaaagcagtattcataaagggattctggactatgtaattgctcataacatcacaaccgtatgcatcggaaaaccgcacgctcatcttctgcagagaattttcggctatagctggatttacactttaatgaaccgactgaatgaaagacagatcgacattattattttatcttagaatgcaatgaaactaaaaacgaaactcaccctcggagtaggtcttttatttgtgctgattgttttgctatcggttatcgggtctttttacatcaataaactgaaatctgacacggaaaaaattcttattgccaattacaacagtctggaattttctcagaatatgcttctggctctggataaaatgaaaaccgacagtgccgttgccattaaagattttaagaaaaataatcttcttcaggaaagaaatttaacggaattcggagagaaggaagctacccagaatcttaatcttcatttcaacagctacatccatgatccttcaccggaaaaggaaaagctgattcgtgaagatctggtaaaaatcatgtcgctcaatatgaaaggaattgagcgaaaaagcgatattgccatcattacagcagaaaatgcaacgttctggatcgcctgtctcggaaccatctgttttttaattgcgatcacgcttgttttcaatcttcctcagacgattgcagaacccatcagtcagcttacgttcagcatccgtcagattgccaataaaaattataacgaaagagttcatttccggggaagtgaagagtttaatgatcttgcgaattctttcaatatcatggcagaaaagcttcaggaatatgaaagcagcactttgtctgaacagcttatggataaaaaacggattgaaaccctcgtgaataatatgcacgatgctgtaatcggtctggacgaaaatcattttatttatatgattaatgatgaggctcttaaaatcaccaatctcaataaagatgaaattatcggaaaaacggttcatgaagtggctgtaaacaatgatctcataagggaacttttgaaaaacatcaatcatccgcagaaagatcctattaaaattgtaaccgacaataaggaaaattattttgagcaggatgtaatcccgatcaatattacaaaaacaggagaaaaggaaaaaaaatacatcggaaaggttattctgctgagaaatattactccttttaaagaactggattttgcaaaaaccaactttatcgcaaccatttcgcacgaattaaaaacgccgatttctgcaataaaaatgggcgttcagcttttggaaaatcaaaaattcggggaactgaatgatcagcagaaagagttattaaaaagcattaatgaagacggacaaagactgcttgatattacgggagaactgctgaatttatcccaggtggaaaccggaaatatccgactgaatatcgaaagctgtgctccaaaagaaatcgtacagactgctgtaaaaaatgtggaaaaactggcggaacagaaaaacatttcgatccagacacagtttctgacagatgaaaaggactttgttttggctgattttgataaaacagtatgggtcatgaataatttcctgagcaatgcgattaaacattcttttcaggacgaaaatatcctgattttggttgaaaaagaacattcgggaattaaattcagcattaccgataccggaaaagggattgaagagaaataccagcgacagattttcgaccgctattttcaggttccgggagaacatcagaacggaaccggtttaggacttgcaatttctaaaaatttcattgagaaacaaaacggagaaatcggagttaaaagttctttaaatcagggaagtactttttattttgtgttgccgatggtttaaataaaattttcgtttgaattagtatatttgcgacaaaactttattcatgaacatttttcagaaattttttttcttattctttttaattatttcaaaatttgttttagctcaaaatgaaaatgaatttcgtgaagcgtttaccttaaaaattgcagttgattctactacgttttatcagcaagaaattgcaaaatccaaatatttcgttaaagataatattttacaaatttatccgggtgaacatctttttattgaaacagaagtaaaagatgataagatacaaacgatgaagattgtgaaagaaaacaagaatcctttgaaaaccatagaaatagaattttctcaggaagtttctggcagacagaacaaaggaatgacactttcggtaagtaatccttttgacaaaaacttaaattatgatgcaattataaatgttgtcggaaagaaaggatggtttgaaacctctattattccgataaaaccaaaattaaaaaattttgaaatgtggccgcagccaatcattaccattgttcttaataattggcgatttgataagtaatttaatgattagaaaatatgtttgaactgcctatttattacttctttattgcatcaatctgttctgcaatcattgtcggtatttattatttcattcagaagaaaaataccattaaaaattacagacaggaaaattcaattgagcttaaaaatatcagcggaacaataattacagacaaaggttctctcagttggggaatggaattgggtacatttgatctgttgattaacgataattcaatttttttatttctgaaaagtttcggttttattccggggcggattacgaatttatttttttcacattccaacaggaaaaatactaaaagagctgttttgctcagagaatataaaattgaccaaaaaagcgttaaacttgtttattatcctgatcatctgatgaacagaagccgtcagattatactgaaaaatctttctgatgaacagctttccattttagaaaaaacacttgaaggcaaaagccgcagattttattaatatgaaaatagaacttatccccgttatcgaagtctcaaattacgatgaggatctggaaatgccttccggttcgtctttagaattttcggatgagtgggaaaaatataatatttctgctaatgtaaaggctggtttttccgaaagtttcaaagcttattttaaaagttcatctttttacagaataactgaaatttctgatgcagatctgttgaaaatcatttacagagaaattgaaatacagcagactgaagaaaatcgcggaattgatgatttggtgtgttctatggacggcggttacattttaaagattaatgatgttgacacctattttccacaatgttgcggaaggcttaaacacattactgaatgggaagatcttgtttccgacgaagggaatcattgtttttatacaggacatccctctccgaaagttaaaatacaggaacataagatcattttcgattttttacattctatgcctcaggaaagttacgcttaccctgttttggaagatcagattgaagtagataaagaatcattgagaacagcaattaaaaatgtaaaaaaagaacttgaacattttgctgagcagctcatcagaattaataaaaaagaaaacttgaatattcctgaaattgataagatcttaatttatggaattattactaatatcataaaatcagaaaaataactatttttaactgttaatacaagagatgaaaaataatattgctttacagttagtcgaaatttgtaaaaagcaccatcttaaagaaaaagcattcgatagctttgaaaaattatttcatatagaaaatgaaaatgaccctgattttcttaaaggttacaagaaagaggaaatgaagatcttttttggaggacatcaatttaatattcaccatcatttttatacaagtaccattaataccaaaataattttttacgattcagcggatgttgaagctggttattgggatcctgtaggttactatgttttagaagccgattttgaaggagaaatcacagacgattattttgtaatagaaagagaaaaacaaattggcggaattgatattattaaagagttttcatatgtattcgccgatcttccaacagattatctgaaaagaaatcaccttcagtataattttgtttcttacctttctttagtaggaactttatttacaagtaaaaattatgaaggttcaggacgtttcattcatcgcgcatattttaatcttaaagaaaccggtgaagagcattttgaaaaggaatttctcaaaaagtcaaagagattcttgaaaatgatgaaaaaatatttaattcatgagaatttgatttccgaaaagctacaatcagactttcagaaacttggattaataataatttcacacctgaattaaatgctgataataacttttcaatatgccggaaactttaatcttttttaccgctttactgggaatttcaaatttccactatttcctttttttcaggagggaaaataagcagctgaagctgaaaatatatttaacggtacttttcatgattaccattctggcaagtttatacatcattatcattactccccatttctttgaatataaaggtttggaaaacggcttgtttctggtgatgattaactttgctgttcccggatatttcttaatgcttttcgggatcaacagtctcttggaaaacattccgattattcgtggctattttactttcaatgttatattttgtattttagttctgagctcaacaatattatactattttttaagtatgcttattttatcaattgattatttctaaaaatttaaaccattataaccatggataacgatctacaaaatgaaataaacttacattctgcaggagcaacggtaagacacgcttccatttttaatcatttggaaacacataaaaatgattttgagctaacccaggaatttattaataaatgggtgattcctttgtacatgaaaatcaggaatacaaatgataatgaatgggtggaatatcttaaacaatttaaggacgaaattacagaagaagttacgctgactcttttgagcgatttcaattggcgaacaagaactatcggagcttatctttctgcattgaaaaactatgaagatcaaatagatattattggtattcatttacttaaaagtgaagtttgctatgcaggagatctttatgctatggttctggcttactataatactccaaagactattgaatatcttaatacctatttagattattatcttcaaaaacctgaactctacttcgatcaggaaagcgttcttgaagctattgcttatctcgatatggttaacaatacgaataatctttcaaaacatattaagcaatggaatacaatgcttgaaaacagaggagaaatttccaaagtcagaaatatccagattgcaaaaattattgaggagcaggaaggagcacacagatcacaaaaattcttaaacagtcttaatcatatcattatcaatccagaattaaacacaaagcgaatagcagaacaaattgactttttaaatcgcttaaaagatttcttcacttagaataatgttttacctttgatctttattacgtttaaaattataaaagcaaatgactacagacacattagacttttgggtaggaaatttcaaaagcgaggaagatttttatgaatttgtggaagaagatgaaaacttttatcttgaagaagattctgatgatgtttttatttcaaaatttgcagaatctcaggacacaatctggctggatcacgattttgtagaatacggctatgaaaacggaaacggaaccatttacgaaaaatttgcagattattcttttgccgaacagtggctcccaattttaatcaacaggctcaacgaactgaatcttgattttgatatcaattccattattttcctgaataaacagattccgaaaccgacttccgtagaaacagattttttctctttggtttacatcggaggaattgaatattctgcgtaaaatatttaaaaacttataacctttttcaaattattaatgaacatttattctgttcttcagattggcgattaccacattaatcattgcgaagattttctcatcacaaagaaaatagggagcaataagattctttgtgctgtaatggatggatgttcaactgctatggaaagtcagtttgcttccacactatttgggaagatcctgcgtaaaatttgcattgaaaaaggttataaagaattatacgaaccggataaaaattctgatcccgaagaagatttaaaagctgttttaaaagatttgtttaaagaacttacaaccgttaaaaatcatttgatgcttgatgaaaaagaacttcttacaacattgattattcttctttacgacaccaaaaacgacgaaggaattatcatatgtatcggagacggttcagtgtgtatcaatggaaaaacaatagaatttgaaagagacaacaaaccggattatctgacctatcatttgaaagaagatttcgaagaattttactttaatcagacgcagaaaatacgattcagtaagcttgaagatgtttctattgctacagacggaatttcatctttcatccctattaaaaagacagatcacaacgaaaaaatcaatccggcagactatcttctctatgataaaagcaattttgattctgaagaaatgctttccctcaaattaaaaaaacttgaacatcattacggaatgaaaccgactgatgatcttgccatcataagaattataaagtaaattttattttcaatataatagattaagtttttgttttatcatgttgatgaacagaaataattttcattacatttgctttatcataacttaataagatgatttctaaaaagttacttcgcatcaatatagctgttttatccctgcttatcgttgtttatactttaggaaattatcttatcctttatccgatgaagtttgatttcctaaccgttatttcgggaagtcagccgcattatcttctttttattattgctttttttgttcttatttcatggttaataagccatgtcagaattaagaatttaagccctaaaaacagatttcttctgactttcaccattttgtgcggaataatgattttatggataggttattttaatttaaacacttacttcaatacccgaaaagtaattacaaaaattgagaatgaatacatccaacaggcgaaagaagatattaaaaatgatcaggttacttttagatttaccggaggatttgaattaccaaacaatgaccgaaaaatggatgtaaaaattgacagcattcaaaaaaagtatggaattaaaagtgaaaatacaggttgtaccatagacgaaattgatagtaaagctcaggaaaaatatatcgaaacagtaaagccgtacttagaaaaaaggaatggaaaaggctgggaaagtaaaatgcagaatgaaatcaacaaactgaaattaaccgaattatctactcaaaaataattttcattaataatttagtttctaaaaaaaaatcgctaaatttaaaacaaactaacaatcagttatttaaattgatttttaataaccataaaaactaaaaacatgaaattatctcaacatcagttatccgaaaattcaggataaattacttcttttttatcgtcatacaggatggattcttaattcatcttttcatctaatttttacttcttaaaaaacgctcagccatgaaaataggaatctatatatccggattgggaatttcaaaaagtaactcggttgaaaattatgcagaacggttaaaaaatgaaatcaatttcaatacaaatggttaccagtacgaaaccaaaatcgaaaaaatccattacagcaaaaacagggaaagtaccgttgtaagcattgttgaaaaagaatctcccgaaaatcctgtttacaaattttacgacttcaaatacaacgaaattctcaccgaagatttcaaaggcagaacgctgatttacaaaagtctctggcttttcgcattggttatcaggaaatttccattaatcatcaaacgaatctttattccccaaaactattcgaagccggggcagttaatgtatgtattttccatatttttgattttatcgctttctttggttctgatgtttcccgccgttctcgaagctacaggtcagtttttctcaaaggaaagcggaaaaataactgaacttagaaaactgattcccgtcggagacctgaaatatatttcgatgaaaggaatttttattgattttcccaatggctgttcttttaatatcgactttcattggctttcaagaatgattgtattattcacagcactattggtattgcttgttccgaacgcaaataccattatcacagatctcgccaccaattttgtctgcgccaacgattatttgcagcatggctcaaaaaaacaactgattcagggaaatttagaacaccttgtagattatattacggaaaacgaaaaagactgtaaaattcattttcatgcctacagtttcggaagtgttctcgcattggattatgtttttccctatggcataaaagcctctaaaaatgctttagaatactgtgaagccattatcactatcggaacaccttatgaatttgtaaattcttattatcctgaattttacaacaaccgccaaacccaacccggagatcagcttcagtggtttaatgtgtattctgcagccgatgctttaggttccaacttcagaaaagacggaattgccggagactctgaaatctcttttaaaggagcttccaataagccgtttaatatcaattacgaagtttatcctatcggaaaattcagcattattgattttattatgctctacagcatcaaagttcatgatatgtactgggacgaaaatacggaaggacaaagctgtctgggactggtttatcaggaaatgaagggaaaaggtttgatgtaaattaaattactcaataatttcccacttatcatatttatattcgtaggtttttactgtttttttactgttgatatactgataaacttttacctgatgatccggcaaattataaaaactaaattgaatgtaatccatccctgtatttcctgagatttccaaagaatctttactatttttggaatagtaataaaattctgctccggactccttcacttttcctacactaaatttcttgaatttttctgcatcttctttatccacgtaataatatccttcataatatccaaaaccactgccaaccgaacttggaatgataaatttatctttaaattttttccctaaataaatcaaatcatcagtggtccaatttcgaagattataaaacggatctttgagattgtatttttcacattcatattcgccaggatctaaacttccacattctaatctaaaaatactgtatctgaaattaatgtatcttctggtaaattgtcgctcatccaaatcatctattaaggttctggttaaagaattgaaatccatttcggaagcttcacgctttagtttatcatacagaatcttatcttttttattttcttcaatgcatttcgcttttgaatatatataattttcataaatagaatcctttttcgcttgggaaaagataatgatagggaaaagcagaaataaaaacttcatcagataaaatttgttcacttaaaattattaataatttttcttagaaatgatcttttcaaaccgatcaataaaaaaactttcacaaatatgaaagtttatcttttttaatatctatttttttaagacacttcaataagctcaaatgacatcactaaaaattgacagcaataaaaataataagcctcatttcatctatttcctgaccggttcataaaaataaggcggtcgcactcccattgacggaaccacaaaagatcctttatttgaaaaataagtaaaaaacccgttttctttgtttgatttatcaggataaaaaattaattctacagattttattttatcagaatcattttgaatttcaccaatctcgaaatactcaaatacaaaaggatcatccggaaaatcataataagtaatttcctttttatcaaagtcgatataagcattctgatctttatctctgaataatttttgggttttaaaataattttcgatatcacttttattattaaacggaataaatgctgccttaggatttgcaaacaaataatcactagccgattctgtacttaatccaagaagcgtaagtttttttccttcaagtctaaaataaaaatgataagtcccaccctgattttttgaaattcctatcgcagaaaaattacaggatgtttcaagttttctgttttctttaaaaaatgattctgaatgtgatgtatatgtattatcaaaatctcttaaggaaaaatcacctttattttgtttaacgaaaaatcctgttttagaaaattcaaaatcgcctaaatacatgggagaatctgtaaaatctacattttcaaaaacatcctgattaaaccagtcaatttcatcttctaaagtagaatttattctcagaataggatatgggccgtcatgataaaaaagcatcatccctaaatcagcatcaatgtatttatcgatattttcagctttatgagaattaaaatctttaacaaaatttgtaaaaacaataagagaatcttcttttacattttcttttgtttccttagtattttttttcacttcggaaccattttctttatgttctttttcacgtaagttaaaaaagaaaacagcagaaattacaataataaaagatgtaataagaatatatagttttgtttttttcacggtttaagttttactaagctttacatttgaaagtaattgtttgataaaaaatgcttcaacaaacttagcgcaacatctctaatactaaaagccttattttagcggctcattcgtagcgacgtcatgctgagcttgccgaagcatcttatacttttttattttttaatgcgcttccagccagttatttcctactccaacttcaaccaataacggaacctgcgtttcaacggcgttttccatttccattttaatgatgtttttggcaacttccacctcatcaatcggggcttcaaaaattaattcgtcatgcacctgaagcagcatttttgtctgcagtttttccttttccagttctttctgaattttaatcattgccatttttaccacatctgctgcgcttccctgaacaggagcattcactgcatttcgttctgcatgaccacgaaccacaaaattattggaattgatgtctttcaaatgacgttttctgcctaaaagtgtttccacataacctacttctcgtgcttttcttacttgttccgccatgtattctttcagtttcggataggtttcaaaataggcttcgatcatttgtttggcttctgttctggaaagtccggtctgctctgccaatgcaaaagcgccctgtccgtaaatgattccgaagtttacggtttttgcctgacttctctgtgttttggaaacttcttccaatggaatattgaacagtttcgccgcagtagaagcgtgaatatcttccccgttctggaatgctttaatcatattgtcttccccggaaatttcggcaatcagacgcagttcgatctgggaataatcggcagaaataattttctttccttctgctgaaacaaacgcgccacgaatttgctgacctctcagcgttcggatcggaatattctgtaaattcggatttacactcgccagacgacctgttgcagccgtagtctgtgagaaattggtatgaacgcggttatcggatttttcaatctgcgacggcaatgcatctacgtaagtcgattttaatttctgataggttctatattccagaatatgcttgatgatttcgtgttttgaagacaatttttgaagcacatcttccgaagttgcatactgtccggtttttgtctttttcgctttcggatcaagctgcattttttcaaataaaatttcacctagctgcttcggagaattcatattaaattcttcccctgaaatctcaaatattttggattcgagttgtcttaaatcattctcaagatcaatactttcctgagccagccatttttcgtcaagagaaattccctccagttccatttttgccaaaacttccatcaaaggcatttctatactgaagaataagtcttctaaattttcttttttaagctgtggcgcaaacaattcgtacagctggaaggttacatctgcatcttcagcggcgtaatcggtctgcgttctgagatccgcatcacggaaactgccttgtttttttccttttttaccgatgatggtttcgatggaaacaggtttgtaatttaagtaaacttctgaaagataatccattccgtgtcttccgtccggatttaaaaggtaatgcgcaatcatggtatcaaacatggctccttttaccgtaatatcgtatcttttaaggattttataatcgaattttaagttgtgcgctacctttaccagatcttctttctcgaaaaacggtctgaaaatttccagtgtctgtaaaacttctccctgatcttcggataaaggaacataatacgccaaaccttttttgtaggaaaaactcatcccgaccaattcggcttccagttcattaagagaggtggtttcggtatcgaagcagactactttttgttttaataaattattgactaaaattttctgtgctttcggattatccacaaactgataaaggtgatcattctgctcaatcgttgattttgtggatgttgcctgatcgagatcttcataagtagcgaaaagatccaactgtccgactgcctgtgcaactttttgctgcggcgtcgtttccgtaacagttacttccacttctgtagctacatttggcactgcagccggagcaaaagcacgataaagattttcgtataatctccggaattctatttcttcaaagacttcttttactttatcgaaatcaggcgtttccagatcgtactgttcctgatgaaattctacaggagcatcgcagataatggtcgctaattttttggataaaattcctctttctgcggaagcttccactttttccttcagctttcctttaagctgattggtgttggctaaaagattttctatgcttccgaattctttcaggaatttcatggctgttttttcaccaacgccttccagtccgggaatattgtcgactgcatctcccatcatcgcaagaaagtcgattacctgtttcggatcttcgatttcgtatttggctttgacttcttcaacgcctaaaatttcaatatcgccgcctttaagtcccggtttataaattttgattttatcggttacaagctgtgcaaagtctttatccggcgttaccatgaatgtgacgtagccttctttttctgctttgcaggcaatggttccgattacatcatctgcttcatatcccggaactcccaaaatgggaatgtgcattgcctccaaaatcctgtgaatgtatggaatcgcatttttaatggcttcaggcgtttcacttcggttggctttataatctgagaagtcttccgttcttatacttgcctctcctacatcaaaaaccactgccaaatgggttggtttttctcttctgatcagttcaattaaagaattcgtaaatccgaagatggcagaagtgtccagacctttgcttgtaagcctcggatttctgatcaatgcgtaatatcccctgaaaatcatcgcataagcatcgatgagaaataaccttttatcttgtgttgcgtccatattttccataaggaacaaagataagaaattacttttctttttcttttgtgctgaattaaaataacagtgcgaattgtcttctgaaagaatctaaatgttgaattctattctaaatatttttcttttatcttgaataaagttcaatacttttttagcaatgcccgtgtcattctgacaaaggaagaatctaaatgcttttttattataacattttcttttgtcctgaaacaaaagaaacaaaaattcaagaccggaaagctgaatgctaaaaatgaatcctatgctctaaaaattctaaaactcgcgcgaatggtaaattggttcttcggtttaaaattctgtcgcgctcagacttaacgttcatctgattcattttcttaacgcttcagcttccgaagtcgattttaaggcaatatgagctgtcattctgaccaaggaagaatctcaattaactacttgtgtaaagattcttcattccataatgcttcgcaaaactccaatcagaatgacaaatgagtactaatcttactgaaaatttcaacggttccgttgtcctagcctcgattgcagcatttgtctgagctcatttctttagtttcggctgcggcggcaaagccgctagtcatggtcggaagaaattccgacctcttttaagttttaaaaactttgtctggatttcctcctgcaaaaatgattaatacagctgtaaccatatcccttagctccatagcaattcgtctnnnnnnnnnnnnnnnnnnnnnnnnnnnnnnnnnnnnnnnnnnnnnnnnnnnnnnnnnnnnnnnnnnnnnnnnnnnnnnnnnnnnnnnnnnnnnnnnnnnncgcgaagtcatctttatgtttgattaagagccatgaattttcttccgtatttttcattttaaccaaagcaaattcacctttcagcttttttccgtgaaggataaattttaatgatcctgctttcaattcgttcaataactctttttcgtcagaaagtttggaattgctatcaagaggttcataggttccgctgtcccagatttctacctgtccggctccgtaatttccttccggaatatttccttcaaaatctttataatcgtaaggatgatcttccaccatcatggcaagacgtttgtctttaggatccagtgaaggacctttcggaaccgcccagcttttcagaacgccatccatttcaagacggaaatcataatgcagtcgtgatgcagcgtgtcgctgaatcacaaaaataagctgctctttgctcttttttgtttttcctttcggttcgctggtttcgttgaatttccgcttttggttgtaatcttttagagccattatgatgcgtttttagatttggtattctgtaaactggcttttagctgcgccatcagatcaattacttttccttcttttgcaggttcggcttttttcgttttgatgcttttaccttttgctttctgtttaatgattttcatcaaagcttcagaataggtgtctttgtacatttcaggatcaaattcctgtgaaagctgttcgatgaggttcaccgccatttttaattcagcaggtttcggagctttcaccgccggaattttaagatctccgtaatccctgatttcctgtgcgaatctcaatcggtttaaaaccaacacttcattgttataagggcggatcattccgatggcttcactttcgcgcagaacaaatgttcctactccaaccatttctgtttttgccagagctttcagcaaaagacgataagcattttccccatttttctgaggttcgagatagtacggattttcaaaataaacagaatctacttcactttcttttacaaactgatcgatggaaaggattctggatttttcaggacttgcggcttcataatcttcttcatccagaataatgtatttgtcgtccatgagatatccttttacaatattttcccatttcacttccttgcctgtattttcgttcactcttttaaatctgatattcgaaaaatcagacttatcaagcatatccaaatccagtttggtggtttcggtagcagaatatattttgacaggaatattgactaatccaaagccaatggcgccgttccagattgctttcattgtactttattttcggtaaaaggtgcaatgattgtgccgagtgaagatgattttttgtgatgtggtatttttaaatttttttaaactttgctttcatctcaagatataacagtgttttatcaagattttctttatcaacattggctttatcaaaaataaaattcatagacgagttagctgtaatgtaaagatatcgatcgtctaaaatacaataggtaatttcgttccatataaatttatattcagatttgtaatttttaaaactaaaatgagatgggctaaattccaaaaagacatctttggagtttccttcaagatttgagatttcacgatttaatttttcataaaaagcctttttatactttttatattgggtcagataattaaaatatgttgaaattacagcaactgaaaagcctaaaaagaatcctgcaaaagtgtagttttcgaaaattatggtaataactccgagtatggtaaataatattccccaaaaaagatttttattattttttttaagattatttttccattgtctattaaattcatattcattaatctgtcttaaaaatttttcggaggaaggtgtgttgtaagtaaaaatttcttcgttcatgtttctgataatagtttttattttttctgtgaatatagatttttatgaattattcagtatttatgctgtcgctttttaaataatcaaacttatccgtgttgatgtctccaatggtagattctacgctgtattgtttagaaacaataatatatctgttcttttcatagcaatgctttataatttcaatagaaatcgattcgttgttatccagattaataattccgctaaagctttcgcacctgtaacgtccttcatcattttcgaaatgatcaaaaatacctttcatatcctcctgactgaaaaatatgttttcaatatctgctgaaacaatagtgtgttttctcaatgttcttttaaaatcatactctacaatttctttagctaccccaaagcaggttgagctaaatacaagcaataatcctgaaatgtaagagagcttcattatttcttcggaaactttttcttttacgttcggagggtaataaagtattttctttataaatatgattatgaaataaactgcacaggctattccagaaatatatcctaaagtggctattagaaaaattagtgttttcataaaaaaagcggagaaaaattccccgcttctaatttatgattataattaaatattttttaatttgtctaataataatgttacatataattcttttaattgttcatcagcaatcgaagaaggcgcatcgatcatcacatcacgacctgagttatttttagggaaagcgatataatctctgattacttcatttccgtccagaattgctaccaaacggtcaaacccgaaagctaatccaccgtgaggcggcgctccgtatttgaaggcattcattaagaaaccaaattgtgcttctgcttcttctttggagaatcctaaaagatcgaacattttagactgcaaatctctgtcaaaaattctgatggaacctccgccgatttcgtttccgttcaacaccatatcgtaagcgtttgctctggcttttcccggatttttttccagcaaatgaatatcttccggttttggagacgtgaaagggtggtgcattgcatgataacgtccgctttcttcatcaaattccaaaagagggaaatcaactacccaaagtggcgcgaattcgttcccttttcttaatcccaaacggtttccaagctccattcttaaagccgaaagctgcgttcttaccttattttcgtttccagaaagaatcaacattaaatcgccttctttagctccgaatttctcgataatttttgctaaatcttcctcactgtagaatttatttaccgaagacgtttttaccccgtcattctggaattttacccaaaccattcccgaagcgccgatttgtggtctttttacccagtcaacaagctcgtcgatctgttttcttgtataatctgcacaaccttcaacattgattcctacaaccaattttgcttcatcaaatattttgaaatcttttccttttaccaaatcattcagttccacgaactccattccgaaacggatgtccggtttgtcgtttccgtatttctgcatcgcatcagcgaaagtcattcttgggaaatctccgaattcctgaccggtgatatctttcaataaagttttcgtcattccttcgaaaacattcatcacatcttcctgctctacaaaagccatttcgcagtcgatttgtgtaaattccggctgtctgtcggctcttaaatcctcgtcacggaaacattttacgatctggaaatacttatccattccgccgaccatcaataactgtttgaaagtctgcggagattgcggcaaagcataaaattgtcccggattcattctgcttggaaccacgaaatctcttgctccttccggtgtagatttaattaaaaccggagtttcaacttcgataaatccgttgtctgaaagatagtttcttactttctgcgccattttatgacggaaaatcaatttatcttttacaggatttcttctgatatccagataacggtatttcattctcaattcttcgccaccgtccgtttcatcctcaatggtgaaaggcggaagctgagattcattaagaaccgttagtttttctactaaaatttcaatttctcctgtcggaatattggggtttttgcttactctttcgataacttttccggtaacctgaattacaaattcacgtcccagttttttagcattttccatcagttctgccgtagaacggtcctgatcgaaaacaagctgcgtaattccgtaacgatcccgaagatctatccaaatcataaatcctttatcacggatagtctgtacccatcctgaaagtgtaacttcttcattaagatttttaagagataattctccgtttgtgtgcgatcgaaacataattatttgtttaaagttcaatgtttaaggctcagatccgaaccttgaattttccgttggcaaagataagatttttgcaggttttaaaaacaaaaaaacttcccgaaggaagttttaaattatttatctctaaaaaaattaaagaaccattgccattgcagactgtttatttttaacagcgtagtcttttgctgttttgcctttgctgtcttttgcctcttttttagccccgaatttcatcagcatttttgcggcatccatatttccggaagcagctgcattcattagaggagtaacatcgctgcaagacttgttgacatcagttttactcaccagataattgaacacattttttttgttttcttttacactcaaagaaagtaaatctgttttggtaccatttaccgtatagcattttgaaaaatcttcctggctgaaagctttctgaaaaccttccagattatcggtacggaacgtattcaattgttctgctgataactcctgtgcaaataatccgttggcaaaaacagaaagtccgaatagcaaagttgctgtaattatttttttcataaaacttgatttatctaaagaatatacaaagctaaataaaatttttcgatcaatgttgctaattattaatccatttcgttgctttttccaaaacttcatccttattgtttttaattccgtctattgtaggttttacttcaacatcgggaacgattcctattctctgggtttcttttccgtcgggataatagatgccgattccgctgatcatggtggaaatatttcccggaagttttatatcagaaacatttccatcggctcctgccgttgtagaaccgaaaacttttgcattcggtgcggttctgaaagccatggtgtgatattccgcactgctttgcgtggtttcattaattaatatggcaattttgccctcataatatttttttccggttccctgagtttttaaacttggtgtaaaagtgaaaagtcccggctgactgttgcttgtattcgtgaattttacgaaatccgagggttctggttttaacagttttcccattttaaaaaccacaaaatctgaaggatagcttctgaaatcaataaccaaacctttcgtgtttttaattttttcaaaaacttcaggaagaagatcggcatttacacttcccatataaacataagcaatgttgccatcgagcattttaaaaaactcttttggctctttttttattttaatatctgaataagcataagtttttatagttttttcttccgtttttccgtctcttaaaatggtaagattgatggtttctgcattgcttcgcaacaattttctcgaaatgtcccgaagttgagtaggataattggaagcaggaatatatttcagcatatttttaatgatgttgtccatattttcaccattaatttccgtgatgatatctccttttttcaatccggtctgtgttcctaaattttcgtcaaaaaagccttcaaccacaggtttattttctgcaaaagttaattttaccggagaatatctttcgccaaaatatttttcaagcgatttgctgtttccccaaatgttggcatgagtgtcgtgaattcttccgatcagttctaaagaagcgagattgtattccgtttcgtcttttgcgttgatgaattttgggataaattctttgagcacgcctttccagtcttcctcgatgaggtttttgtaaggaaaataatactgaatcatattccagtatctgtaaagagaaagcagcctgaaaccttcatcaggatacttcatctctctgtaaggattttcatgcctgaaatcaggattttctacatttggaaagaaatcgacgtaataattgacttttggtcttttggcatctttcagttgtaaaagcatctctgtaagttctttcgagaagccgtaattggtaatccagtcgagatccggtttgatcttcacatttttaggctcagaattttttgctgtctgaaatttgcctaaacctttgatccagtctgttaaaatctgatctctctgttcagcagaagcattttcagtttttttataaattctgaaaagttcgtaatcccagttgtagtttccttcggctacgcttggatgataatatttcagatacccccagattaatcccagttttttaagattttcaatattattctgatcgaggttgatattggaaattgtagagcctttatcaaattctttatcaagctcaactttcgttaattttttttcgaaaattttagcattttcaatgtcttttccgtcaatggaaacttttaagtcgtctacccagatttttccttttcctgaaagcaatgctccgataacgatctgttgtgtgttttccggagacatattgagggtaacctcatattttttccagtcgtttgtacctttcagaccaacgttttgcatattgttaaaagcaacttcaggatcaattctcatccataatcccgcaaatccatccgttacattttctgttttgagatatccggaaagcgtaatttttcttcctgcatagttattgggaagggtgtacatgattgctctgaagccttctgtaccttcagattctatcacggcggatgcctttccctgttgtttttcattaaaatccgaaaaaacttttgcagaattgtttcccattaatttccataaggtaggagaattgttttccgaggtttcaaaatcgagattttcaattttttgctgggcaaaagaagtcattccccatagaagaaatgggatgatgaaatattttttcatagtgattaaatttttttgtcaaatctaaaaagacagatctgatattattgtttgtgaataatggttttaaggaagtttgtgaggtttgagaatatttttaacgaattttttagttttaaaatcttaaagaatattaatcttttacatattcaaggatgtctccgggttggcaatccagtgctttgcatatggcttccagtgttgaaagctttactgctttagcttttccggtcttaagaatggaaagattagcctgggtaatgccaattttttcggcaagttcctgagactgcatttttcttttcgccaacatgacgtctacgttgatgattattggcataaattaaattgttaaatcattttcagttttaagatcaacagcttgcttataaacctgagaaacgatgtatataattgcggataccaaaaatagctgaaaattttgattgtcaatgctaaaattaaaagtaactttatttagcaaagcttctgtaattgtatcacttataacagaaaaacatcctaaagctaaggtgtaattagcaatttttgaaataatcttgtaaatttctaatgaaaacggactcttcatctgaattttattcgccagttttaaaacatttgaaaaaagtatagtttgtaatattcctaatatgattgtcataaaaaggatcactatggaaacttctttttttaaagactgaatatcctgtatgtgtaatcttttactatctatttttattttgcttaaaacaccaacatcaataccgactatttttgtaatcagtaaaatagcaagaagaaatatggttatataggagatgattaaataaagccataaaagagtagtgagaatgctcaaaatcgtggatgaataatttttcatagtattttttattgcaaatatataattatttattgttttacgataaaaaattattgaattttttattttttatttttctgagttgataaatgcgcttcgactgatctgttcagaatctttttcataaactttccataagccaggttataatcatttttgaatctatatttttgcggaatataaaaccgaatccatgtcaaaatatttcaattttcttaaaaaagcgctaagcggtgaagaagtcgactataccaaagcaacgataagaagtgcggttcttcttctcgccattcctatgatgctggaaatggcaatggaatctgtatttgcattggtagatctctattttgtaggtcatcttaaagaaagcggatttgcaatacagacagtgggattaacagaatctgtactttctgtgatgtattccattgcaataggaatgagtatggcggcaacagcgatggtagcaagaagagtgggggagaaaaatcccgaacaggcttccagaagtgcagcgcaggttttgctggtctcttttgttattacttttctattgagtctgcttggagtgatctacgctgaggaaattttaattctgatgggttcaaagcctgaagcagcagcgtacggaaaagaattcacgagaattatgatgggaagcagtgtcatcatcatgcttttattcttaatcaacggaatttttcggggagcgggaaatgctgctattgcaatgaaatctctctggatagctaatattgcgaatataattttatgtccggttttaatcaaaggtttcggtccggttcccgccatgggattaacgggagcggctttggcaaccaccatcggaagaagtattggagtgatctatcaattatatcatcttctgattgcagatacgcagatcagaattcagtcaaaatattttaaacccgactttgaaatcattaaatcggttatcaaaattgcaactcccggaatttttcagtttgtaattgcttcatgcagttggatttttctggctcaactggtcgcaacaaccggcggtgaaaatgcttctgcaggatatcagaccgctctgcgtttaatgatattctttttgcttccggcttggggattaagcaacgccgcatcaacgttagtcggacaaaatatgggagccaacgaaatgttgagagcagaacagtccgttatgaaaactgtaaagtataatgtgatctttatggtgaccgtaagtgttattttcttttttatgggagattttttagtcggatttttcaccaacgaatctgaaattaaaactattgctaccaatgctttgcatattatggcggtaggatttattttctacggaataggaatggtgatgattaatgcttttaacggagcaggagatacctggactccgacttgggtgaatttgtgcggattctggctgttccagattcccttagcgtattttttgtccaaatatttcggaatgggagcgaaaggtgtctttatatctattcccgtaaccgaaactttaatcaccatcgttgcttttatactgtttaaaaaaggaaaatggaaaacggtaaaggtataaaaagtatggatgctaggtttttttaacaaaggtcgatttacgcttcagtaataaacttccagcctttgtcttccaacctcccgctacagaattataaaaattttaacagcttcaatctttgatttttacagggtattttttaatttcgtagtcaatcaactaaaatttatttctatgggaaaaggagacaaaaaatctaaaagaggtaagatcaacaatggaagctatggaaaaagaagaccgagaaaagcttcgaaaatagttgctgcttcagaagaaaaaactaaaaattaaaataaaaagaccggagattattttttctccggtcttttttatgtaacaaaattaaattattttccgaaaaatccgccaaggatatctcccaatccgcctccgccttgctgcttctgctgattgcctcctccaagaacgctccccagaatgtcattcaaaggatttccggactgagaatttccgccgcccaaaacgcttcctaaaatatcatttaaagggctagactgctgttgctgagcctgattggatgcattcccaagaattcctcccaaaagatcgcctaaacctcctgctcctacattgttctgttgcttttcttttccgatgtagcccataattacaggagccagcatcgctaaaataggtcccactttatcaatggaaattcctgtattttgtgaaagctgattttctacattcgatttatctccaccaaaaatatggcttaatatagaacctccttcagcctgtctcgcatctgcctgagaaacgtcgtccagaatacttccgtcgtgatctttatccaaagcgttatttaaagcttcagcttcattcgcgtcctgagatttgtttctaaggtaagaaatgataagcggtgccgcaactgccagtaaagcaattacctgcgttttgctgatcccgaatttgttttcagcctgttcagcaacctgattgccggtgttccctgtaagtaggtcgattaaactcatagtttgtgtttattttattgttaagtcaaccaaagttatcaaaaaatattccccaaagattttttttaatcaaaaattgagatttatttttgaaattacctataagttattgattatcaataattaattttttaatatcggaacattggaacatgcttcaccaaacatcagcgatttcacgatcggctgaagctgttcaaccagttcgatgtacgcgttttcaggaatctctttgtctgagcatccttttaccaagactctttttccgcgcatttcatcaaaatcatggctttgaatggcgttgtgcattaaaataacttccagatcttcacggtttccgaaaactatttttttggttactcccgtaagtcttgccgtaatcaggaaatatgcccaaagcggaacaattgcatccgcagaattgtatacatatacatacgcatcacgatattcttcaacatcaatcgctgccactttttcgcggaagtctttttcctttaagaccatttccatgaaaagaaaatctttaagatcaattccctttctggctcccttcggaacaagatccgtaagatcaaaattgattaaaccgctttccgcaactttattccgtatttcaaattcttctgacattttttatcattatctttgaacaaatttacaaattaagatcgtacaacgtcttacttgttctctattctgattatagaaatgaaatattacattatcgcaggagaggcttccggagatttgcacggaagcaatttaatgaaagctttgaagcagaaagattccactgccgaattcagattctggggtggcgatttaatggcgcaacagggcggaactttggtgaaacattaccgcgatctggctttcatgggatttctggaagtagccatgaatctgcggaccattctgaataatattaaattctgcaaagaagatattaaaaacaacagaccggatgttttaattttggtggattatcccggattcaatttaaggatcgcgaaatttgccaaagaactgggcattaaagtcgtttactatatttcgccgcagctttgggcatggaaagagggtagagtagagatcattaaaaaatatgtggatgaaatgatggtgattcttccgtttgaggaagatttctacaaaaaacatggggtacattcgcattttgtaggtcatccgttgcttgatgcgatttcaacgctgcaaaatattgatgttgaagtatttaaaaaggaaaataatttaaacgaaaaagaaattattgcgcttttgccgggttccagaaaacaggaagtggaaaaaatgctggaaatgatgctttccgtaagaccttactttaaagaatatcagttcgttattgcaggagcaccgagtttgccaaaagaattttatcagaattatgtagacgaaaatgtacattttgtttccaataaaacgtatgatttgttgaggtgttcgaaagcagctttggtaacatcgggaacggcaactttagaaactgctttactgaatgttcctgaagtagtttgctaccggggaagcaaaatttcttatgcgattgcaaaaaggctcgttaaaaacatcaaatatatttctctggtgaatttaatcatggatcgtgaagtcgttaaagaactgattcagaatgatcttaacacgaataatctggtggaagaactgaaaaagattttagaaaccgagaaaagaacaccgcttttaagagattacgatttgttgagagaaaaattaggcggaaaaggagccagtgaaaatgcggcggatgtcattttaaaggtttaaaaaatcaaataaactataaaaaaccgtagaaaatttttctgcgatttttcttttatatcatgaatttaagtcaaaatttaagattttaaaattttgatttgccgattgttattcaattaaatatttttgagatacacaaattttgaaattgaataaacagccgattttaattcttgccatctcttttatttcgggaatttttgttcaggattttttttctctgaatgaaagttttatgtattccgttgtcatcatttgtgctttcattttagccattactttttttaaaaattactacctccataaagcgaaaccttatttactcggctttatgtttttcggggtcggaattatcctgcattttttcaatgcttttgcatccggaaatagttcggtttctaaaaatgaaaccattgtttttaaaatggctaaaaaactgaattccagtaatgaaaatcgaaagtatgaaggcgtaatacaagcaggaaatcaaactttcaatgcagttatttacattccgaaaaacgtaaaggaacttgatttcttacattattatcaggctcaggcttacgtttcaaaaccgaagccgccacaatatgattttcagtttgattattcgaaatatcttttaaggaaaaatattgaataccagtgttatatcaatgataaaattgcggaagcggaaagaaaagatttaagcttcacggagaaattttctcagaaaagactggaagttttgcaaagaattgatgaaaccggaatgtcttcaaagtcgaaagaatttttaaaaggaattattcttgccgaccgaacggaaatggatgcgcatacggttcaggattttaaccgttccggattggtgcattttcttgcgatttcgggaacacatatcgtggtgattttcgggttattttactttttactaattaaaattctgccattaaagctcagaaaatatgctattatttcaagcttgatttttatctggctttttaccttttttatcggattcggaagctccgtcgtacgttcaggtctgatgttgagtatctactttgtatatgttttgcttcagagaaaacccgatctgctgcattcactttctctgtctgctttcattattttaatatttgatactcaacagctttttgatgtcggttttcagttgagcttttgtgcggttctcggaatttactggctgaatcagccggttttaaattattttccgatacaggataacaggtttaaaaaactgatctttaatacaatttcgatttctgtttctgcccaattggcaacacttcctctggttctgtactattttcatcagttttcgtttatttcaattgctgcgaacttttttattgttcccttttcggaaattattatcgttttctctttcataataacagttttagttgcgtttaaacttgattttagtctggtgaatattgtctatgattttatcatccggttattattggaggtaattcattggtttgcagatttcgagatgttattccatgaaaatataccgatgaatcttgttgaagtttttgctttgtttctcatcgtttattttctgagattttttattctgaagccaaaattgaaaaatgttacaattgtaatgacagcagttatcgctttttatgctttaagaattggttttaatttttatgaaaacaatcgtgaagaaattctatttgctgatttttctaaaacccaagttttatctgtaaaaaaaggaaataatgcctgtttctggattgacgaaaattcagatcagagaaaaatgattcagtttattgtaaatccttattgttcttcaagaagaattagtaattatcagattaaaaccttcccgaaagaagtgaaaaaagtagtttacaaaggcaaaatttatgatttaaattaatcattgcattttctgtttttcctttatttataatattttaagtcttatttagaaagattacaaactgggtttttgtgagatttctcactttttgatgttgttaacatttcttaattttgtggaaaatcaaatttaaacttatatggcaggtttaacgagttctacgataggtagaaaatatgctatggcattatcagctctgtttttgctgatttttcttatactgcatttgacgaccaatttgttatcagtcctaaaccgtgatgcattcaataccgcatcagaatttatgggctataatccttttgtgcagttcttaatgcagcctattcttggttttgcagttcttttccatttcattatgggatttgttcttgaaattaagaataacaaagcacgtcctgtgaagtatgcagcaaacaacgcttctgcaaattcttcatggatgtccagaaatatgattatttccggatctgtagtgttggcttttctggcgcttcacttctatgatttctggtggcatgagatcaactacaagtatgttcagggaattgctcctgatgctgaacgtttctggccggaacttcacgagaagttcgcagatatctggagagtggctttgtatgtaatttctttcgttttgttagggttgcacttggctcacggatttcagtcttcattccagtcaatcggggcaagacatccaaaatatacgccggtaattaaggctttcggaaaatggtattctatcctgattcctgcaggttttatcattatcgcaatttatcactttgtaactcaataatatcaatatactaatatgagtaaattagattcaaaaattccagcgggtcctcttaaggataaatggaaaaatcataaagaccatatgaaccttgttgcacccaacaacagagacaagattgatattattgttgtaggtacaggtttggcaggtggttctgcggcagctactctggctgagcaaggatataacgtaaaagcattctgctatcaggattctccaagaagagcgcactctatcgctgctcagggaggtatcaacgcagctaaaaactatcagggagacggtgactctacgtacagattgttctatgataccattaaagggggagactacagagcaagagaggcaaacgtttacagattggctgaagtttctgcaaatatcatcgaccagtgcgttgctcagggagtgcctttcgggcgtgagtacggaggtcagttagataaccgttcatttggcggggttcaggtaaaaagaacgttctacgcaaaaggacagacggggcaacagttattattaggtgcttattctgcaatgagccgtcagatcggtaaaggcagaattaaaatgtacaaccgtcatgaaatgatggatcttgtgatcgtagacggaaaagcaagaggaatcatcgcaagaaatcttgtgacaggtgaaatcgaaagacattctgcacacgcagtggttattgcttcaggaggatacggaaacgtatatttcctttctacaaacgcaatgggttctaacgtttctgcagcatggaagattcacaaaaaaggagcgtatttcgcaaatccttgctatgtacagattcacccgacgtgtattccggttcacggaacacagcagtctaaacttactttaatgtctgaatctttaagaaactcgggaagaatctgggttcctaaaaagattgaagatgcagaagcaatcagagcaggaaaattaagacctgaaaacatcaaagaagaagacagagattattatctggaaagaagatatcctgcattcggtaacctggttcctagagacgttgcttcaagagcggctaaggaaagatgtgatgccggatacggaatcgaaaagaacgatactcaggaaggtgtttaccttgatttctctacagagatcatgaaaaaaggtagagaagctgctattgagaaacacatcagcaatcctacagatcagcagatttatgatttgggtaaaaagtgggttgaagagaaatacggtaaccttttcgtaatgtacgaaaaaattacagcagacgatccttacaaaactccgatgaagatttatcctgcggttcactataccatgggtggagtttgggtagattacaacttacagtctactattccgggatgttttgttatcggggaagcgaacttctcagatcacggagcaaacagattgggagcttctgctttgatgcaggggcttgcagacggatacttcgtacttccttacaccattgcagattatctttctgcagatatcagaacaggagcaattcctacagattcttctgcttttacagaggctgaaaaaggaattaaagaaaaaattgatttcttcttaaataataaaggaacgcattcggtagattatttccacaagcagttaggaaacattatgtggaataaagtaggaatgggaagaacccctgaagggttaagagaagccatcagagaaattgaagaagtaagaaacaatttctggaaaaacgtaaaagttcccggagataacgacggaatgaatactgagcttgaaaaagcgttcagagttgccgatttcttagagcttggacagttaatggctatcgatgcattgcacagaaacgaatcttgtggaggacatttccgtgaagaccactcaactccggacggagaggctgaaagagatgacgaaaattacaaatatgtaggagcttgggaatatcagggaagcgatatcaacgcggaagtgttgcataaagaagaactgatctacgagaacatcgaagttaaaacaagaagttacaaataatctccaatcttttaaatatacaattatgagtgcaaaaaaaggcttacatcttacgctgaaaatttggagacaaaaaaataataaatctaaaggtcagtttgagacttataaaatatcggatgtttctacagattcttcatttctggagatgttggacatccttaacgagagtttaattaacgaaggaaaagagccggtagctttcgatcacgactgtcgtgaaggaatctgcggaatgtgttctctttacatcaacggcagagcacacggtccggatacaggaattacaacctgtcagcttcacatgagaatgttcaaagacggtgaaaccatcgttatcgaaccatggagaagtgcggctttcccggttatcaaagacttaatggtagacagaagcgcattcgacagagtaatggctgcaggtggtttcatttcagtgaacacttcaggaaatactttggacgccaatgcaattccggttcctaaagaagatgcagacaaagcaatggacgctgcagcttgtatcggatgcggagcttgtgtggctacctgtaaaaacggatctgcaatgcttttcgttggagctaaagtttctcagtacgcacttttaccgcagggtagagtagaagcgaagagaagagtgctgaacatggtaaaagccatggacgaagaaggattcggaaactgttccaacacaggagcttgtgaagtggagtgtccgaaaggaatttctcttgaaaacattgcccgaatgaacagagaatttatcacagcttttgctgacagaggataaaatctatcgagataacataaaaaatcgtctcctcaccggatggcgattttttttagttaaatctttcataaaagtaatatttaattgcttttagtttaatgaaaaaactatttttgcgtaattataaaattcaaaatgaaaaaatatcttttattgtttatcatcgcggtttttgcgatgtcttgctctaaaaaagtagaagtaaaaggaaaaatcacgggaggttctccattggagagaatcgaattaatagaagcttcgggagtagctactttaccattaatgaatatcggggtaaataaggacggaactttcacaggaaatttcgatgctccgaaaagcggaatgtatcttctttcttatggaggaaaaagaaatttaatctatcttaaaggaggtcagaaacttgaaatttcaggtaatgcaatgactttcccgactgaatatgtgattacaggagatgcgaagaacaataacgatttcttcatggctacccagaaatatcttgcaacgtatgctcagacagttaatatgaatgagctgatgacgaaagatgaaaaaaccttccttaagggaatggaaaaagttcaggcagatgttaataaaaacatcgatgaaaatgttaagaagtttagtccggataatgaagtggttacgtggaagaaaaacgatctttcaactacgttgcttaccatcctgaaccagtatgaaatgggacataagcaaatgggcaatccttcatttaaagtaacgaaagcttttacagatttcactaataagctggaagagaacaaagatgtattggtaaaagaacatcctttatacagagaatatcttttaaccaaaatgagccctgatttccagaaatatgctcaagcaaaaactgcagggaaaacggatgttactacttcagaactattcacagaatatttaaagaaaaatcagaaagatctatcacagacggctaaagactatttattggcattcgtaatggcgcagtcggatattcatccgggttcacctgaaaaaacagttgagaagatcaaaaaaattatcgacgaagatattaaagatgctaccattaaagaagatctaaagaaaattcagtttgccatcaacggattcaaaattggagaacaggctcctgaagcttctttagtaaaagcagacggaaaatcttacaatctttctgaaaataaaggaaaaccatatttgttatctttttatgcttcttggaatccttacatcgcagaagctaccattcctgtattgaaagaagtagtgaatttttacaaatctaaaatgaattttgtttttgtaaacgtagacgatacaaaagaccagtttgtgaaaacaagcagctctttactaaaaggaattaccggaactaacgtttacggtgaaaacggattaaattctgatattgctaaaaaatacggagtttacggatttaagttaccttgctttatcgtggtagataaagacggtaaaattgcaagcaagccgttcttcaacttaggagatccggaattggtgacggttttagacaagcaaacaggtctttccgctccaaaggtaaatcctaacgttcagttacaaccgggattaggaatggatcctgcagtagttgcggctcagcagcagcaagcagcacaacaggctcctcagcaacaggcaaatcctcagccggctcagacgaaataatttaaattgagtacagatataaaccttatcttcggataaggttttttttattgtatttttgcagactgaaacgtaaaagtttcattaggaaaatagaaaattgtacaatgagcagaaagaataagaaaaatttaattcttgaaaatataaaactcttaaatgcaggagctaaaggagtggcaataggaagaacggaagaagggaaaaccgtaatggtttccggagcaattccgggagatgtggtgaatgtaagagtgaaaaaagcaaagtccaaatactttgaaggtgaagctttggaagttcttgaaaaatcgccttacagagtagagccgaaatgtgttcactttggagtctgcggaggctgtaaatggcagaatatgagctatgaaaagcagctcgctttcaaacaggaagaagtgtataataatattaaacgaatcggagggattgaaaattttgagaccgttccgattttaggttcggaagagcagtatttttaccgaaataaaatggagttttctttctccaattcccgttggcttacccaatacgagatcagttccgaagaaaatttcggcagcagagatgctttagggtttcatattccggggatgtggagtaaaatccttgatcttaaagaatgtttccttcaggaagatccttcaaacgcgatccgattggcagtgaaacagtatgctgtaaatgaaggtttagacttttttgatgtccgcaatcacgaaggctttttaagaactttaatgatgagacaaaactcaaaaggcgaatggatggttcttttccagcttttcagagaagaaaaagaaaacagagaaaagttattcaacttcttgcttgaaaaattcccgcagatcaagactttggtctacgcgattaatccgaaagccaacgattctatttatgatctggatatcaatgtgtattttggggaaggctatttaatggaggaaatggatggtttaaagtttaaaatcggtccaaaatcattctttcagaccaactacaaacaggctttggaattatacagaaaaacgcttgaattcgcagatttaaaaggagatgaagttgtgtatgatctttatacaggtacaggaacaatcgctcagtatgtcgcaagaaatgcaaagcaggtcatcggaatagaatctgtacaggaagccatagatgcagccattgaacacgcagaactgaacggtcttacgaatacaacgttctattgcggagatatgaaagacattttcaatgacgatttccttgcaaatcatcctaaagcagatgtcctgatcacagatcctccaagagacggaatgcaccagaaagtggttgagcagattttaaaactttctcctgaaaaagtagtttacgtaagctgtaattctgctacacaggcaagagatttagccttaatgaaagaacagtatgatgtggtaaagattttaccggtggatatgttcccgcagacgcatcatgtagaaaatattgctttgctgattaagaaataatttaattacttttgaaggaatcaaatcttaagatgaaatgccggatttgcccggtaaagtaaaacaaaatgttcagatgaaatattttaaatttttaatcgccatttcttttatcagtctgcttttttcatgtggcggcgataatgatatctgtgaaagcggggaaggaactccacgaatgaaagtttcttttaaaacacaggcaaccgataaggaaaaaacactggattctctgtatgtagcagtagattatggctccggaaaagtacagttgggaggacaggctgaaattacatcaagagttattcctttaagagtagacaattctgcatatacagatatttatttcagaattactaataaaggtgcggaatctaaagtaagagtaaactacactacgaaatctgcatatgtttctccgggttgcggaataaagcttacctacgaaaatttaaattcagtattagatccaaacacaacgactccggtaaaagaaatccaggccggacaaaattttatagagaatgaagacaagactaatcttttccttcttttttagtataatcagtcttctgggttttgctcaggagaaaaaagaaaaggaaactgcaaaggaaaaatggaaatatgaaccgaatttcatgatcggttttgatgttctgaatacgggagtttctttcttttcagacagaaagctgtatcagggttttgtatcttcaaagctgaaagataatcttcatgccatagcagaagccggttttgaatccaatatttaccagaaaaacggttatgacggaaaagcaaacggtcctttcgtaaagatcggagctttttatatgctggcaaaagaccttgaaaatgaattcaatggtttctatgcgggggggaaagtagccggttcattttataagcaggaatatatggcggttcccgttcgtggttacggtggaagcagctctgcaatatcctttccttcttctacacagtcatcctattggctggaaggaacattgggaggaagagtacagctttttgaaactaatttctacattgatgtcaatcttcagccgagatatttggtatacaccacaaaacaggacgaaattcagcccatgatcgttccgggattcggaagaagctcttctaaattcggaatgggcttcgcgtggaatcttgcctataagttttagcgggttttcggtattttgataacagatttagattttccttttaacagaatataaagtccctccaattcttttggggggattcctgcatcaaatcctgctgaattgtaagtatttccatttgcagtaacagtaatggaagaagccaaagctccgtctgaaaaccttctggttgttgaagattcatatgtggatattttcgtaagatccaaaagatttacttgtttggaaatattttcccaatccgttgcggtaatttgtgatgtagaagtgtttccgttaagataggtggttaccgcatcttttgtaaaggtaattaatctatttgttcctctcgtctgttctcttaattctatcttttcgattttattgtatttttcaattattgttgaattatgtactgtgtttttataattattttgtgaaatacatttaatatttaaaaaacagtaaattattaaaaatagagtattgcctttcattttagttttatgtgtgttaaaatacattttttattatgattgtattaaaaaatgtaccacaaattgatatatttgtatattaattaatatttctaatatatgaattttaaaattacttttagagtttcttttttattatttgtattggtaggctattcaatctttgctcaaaaacaaaaaattcagggacaggaaaagattgtatttggcaaaacatatacagtagatgatttaaagaaaatgaatggggttattagatgtgcatccacagagtatgaagctatgttgcagagaaatgatcctaaaagaatgaatgaagctcagtttgaagcttggttggcgccattaattgagaattcaaaaacaaataaatctcaaaatggtggaattattacgattcctgttgtagtacacgtaatccatagcggacaggctttaggagtggctccaaatattactgataatcaggttaagtctcagattactgtaatgaataatgattacagaagaatgtcgggaacaccgggctttaattccaatgcagttggagccgatacgatgattcagtttgctttggcaaaagtagatcctaatggtaatcctactgatggtatagatcgtgtaaatctttgtcagacatcttgggcaacatctgctattgatgattatgtaaagccattaacgatctgggatcccacaaaatatatgaacatgtggagtgtgaattttgcggatacaagtttattaggatatgcgcaatttccttcatcttcgggtttaggaggtttaaatgctaatggaggttctgcaaatacagacggagtggttgctaactatgcaacatttggaagtagtgactataatgatggaacttttcttttagcggctccgtatgataaaggaagaacaatgactcatgaagttggtcattttttaggattaagacacatctggggagataactcttcttgtacagtgaatgcaacagatagtaacaaggattactgtccggatacgcctgctgcaagtgctgcaaactataactgtgtgactacagactcttgtccttcagcttctggaagtgatatgattgaaaattatatggattatactccggatacatgtatgaatatttttacaatcaaccagaaagatagaattacagcagtaatgaataattctccaagaagaatggaattgaaaacttctacagccgatcagacaatttctttatttgctaatgatggagaactgaaaggagaaagaagctgtagtgaaacttcttgtggagccgtttcaaatgtaacagtacagtatatgttatataacagaggtacgaatgtcttaacttcagcggtaatttcttattccgttaatggtggagctttacaaacttacaactggagcggaagtttagctcaggataagtatactataattagcttacctacgggagcatcacaaggtagtattacagctcaaattacttctgttaatggaactgctgaccaaagagcagggaataattcttctactgttgtcataggaaattcagttcctgtagctagtaccaatttcacttttgaattacagagagacccttggggatcagaaacaacatgggatttaaagaatagtgctggaaccgtactatatagtggtgcagctacaactgatgcctatccaaatatgccttctttattcacccaaagttgggtactgcctttaaacgattgctatacttttacaattaatgatgattatggagatgggatttatgatttagatggaagttatagagtgcttaactcagcaggtgttgttgtggtttctggtaacacttttacttactcacagcagagaacatttaaagttatccctaatttagttttagcaacaaacgaagtaaagaataaagattcatttgcagtttatccaaacccagccaatgatgtgttaaatgttactaaagtttcaggtaaagctaagtttgaaatttataatgcggtaggacaattagtgaaagcaggaaatattgataacaatcaggtaagagtttatgaattagttaaaggaacctacatcattacaataaaagatggtaatatctctgagaatattaaatttattaaaaaataaataatcattacattatttatagaaagctctgaaatttatttcagggcttttttgttattagttagcaatttttttgtttttggtctgttgtttttataaataagcttctttttttaaatatttttatttaaaatatttacatttgcaaatattaaataatttatatgcgaaagtctactacttttaaagctttatttttattatcttctttttttgccgcagatttagtggctcaaaatgttactaaaagaaaagctgattttaacgttgaaaaatcaccatctgaacttgcgaaatcttatggatttgataggtgttcaacaactgaatacgaagaatttctacaaaagacatttccgggaagaatgactgtagaacagtttgaatcctggctagctcccttagtggagaaagctaaagcaaataaatcccaaaacggaaatattataaccattcctgttgtggtacacgttattcatagtggtcagaatttaggagtagcgccaaatattgttgatgaacaggtgatatctcagataacagtaatgaacaacgatttcagaagattggctggaactccgggattcaataccaatgccgttggagcagataccatgattcagttcgctttagccaaagtagatcccaatggaaatcctaccaatgggattgatcgtgtaaatttgtgtcaggctacatggtctcaggcggaaatcaattcatttgtaaaacctgaaacaatttgggatcctacccaatatatgaatatgtggagtgtaagtttcacaagttctacattattgggatacgcccagtttccttcgaattctaatctgggaggtttaagtacaattggcggcgaggcttataccgatggggttgttgctaattatgccacatttggaagcagtgattataatgtgaataactctttcctgcttggagctccttatgataaaggaagaacaatgacgcatgaagtgggtcactttttgggattgagacacatatggggagataatgcttcttgtgttgtgaatgcgacagatagcaataaagactattgtccggatacacccgctgcaagtgctcccaattacaattgtgtaacagtagattcttgcccttctgcggctggaaacgatatgattcagaattatatggattatacaacagatacctgtatgaacgtatttacagtcaatcagaaagacaggataactgcggttatgaataattctccaaggagagtggagttgaaaacttctaccaaagatatagctattccattatttgcaaatgatgcggaagtaaaacttgaaagggaatgtaatacagtagattgttccagtgttactcaggctccaaaaatttccttatacaacagaggaactagtacaatgacttctgcggtaataacctataccctgaacggaaatgttcagacatttaactggagcggaagtttagctcaggataaatatgcaatcattacacttcctatgagttctacagctttgggaggacagctaaacattaatgtaacctctgtaaatggagcagtagaccaaagaacatccaacagtaatgtaacagtaaactatcttggagctcctgcaagaatggatactaatgtcgtgtttaatcttcaactggacaattacggaagtgaaacttcatggacgctgactaatagttcgggaacggttatttacagcagtcccgcagttggatatacagattccggtgcaaatcttccggcgctgattagtgaaaactggacattaaatccaaatgaatgctatacatttacaattaacgattcttatggggacggactttatccttacggaggatattataatatcaaaactcagggtggggtaactttgctttcaggatcgcacttcagttctacacaaagcagatttttaaagtcgcaggttttatcaaccagtgatgtagcaaaccctaaaaatgatattcagatctatccaaacccggtatcagatattttaaatattaccaaagtttcagataaagcgacttataaaatttatggagcaactggacaattggtaaaacaaggaaatatcaataacggacagattaatgtttctgaattaattaaagggggatacgtaattactgttgaagaaaaaggaaaagaatctttcaattctaaattcatcaaaaaataattaaagtaactttcaataaataaaatcctcaggtttacctggggatttttttataattgatttttaataaattgtagggtttcagctgtattatgtattgtataaatatggtaaagataagataacttcagtttttcaatttcatatatattactagtttggttggttattcccaatgctttgaattgaattgttgaaaagtctgtataaaaaaaatagaaatatttttaatttaataattaaatttgtttagatttgtataattaatatattgagaaagttatgaagaaaaattttacttctttctttttcctctttttgtttgcgattaccagtgcacaatggagtcccacgacatttcgaggggaaaaagccagagctagttctgatattaagaactattactctttggacatttctctgctaaagtctcaattggcgaaagctcaggaaacgggaaaaaatgcaaaacccgtcacgatttctttgccaactttagatgggaaaattgaaaaatttgccgtttacagcttccctgtggtcgtaaaagaactggcagatcagtatcagttaggatcttatgtaggagtcggggtagatgatcccggcaaatatctgagattcagtttagcacccgatgattttcagtcgatgatcatcaaggatggtaaatatgaatttatagaacctgctgataaaaacaaaacagtttatggtgtgcatccaaaaactgataaaagcaatgaaggttttctttgctctatgaacgaagacagactatccaaacaagagatagcaaatctttattcagcaggaaaatcatttgccaatcagacaacaaactttgccaagtcatccgacaaaaagtacagaacaatgagactggcaatgtctgtaaccggtgaatatacacagtacttcggcggtaccgttgctaatgctttaacagcaatcaatgcaacattaaccagagtaaatggggtgtttgaaaaagattttgctttacaccttaatttacagaattttccaaatgtaatttataccaatgctgcaacagatccttattcgcctgcagcccagatgaataactggaatttggaacttcagcaaacacttactgctaacgttgggaatgccaactacgatatcggtcacctatttggtgcttccggtggtggaggtaatgcaggatgtataggatgtatttgtgtagatcctacaggtcccacttctcagcagaaaggatcaggatatacttctcctgcggatggtattcctcagggagataattttgatatagattatgtagcccacgagataggtcatcaattgggtgcaaatcatacattctcccatggtttggaaacagccggagtaaacgttgagccgggatccgggtcaacaattatgggatatgcaggaataacaggagcaaatactgatgttcaggctcactcagatccttacttccatgcagtaagcattactcaggtacagaacagattaatcagcagaacgtgtgatgttgaaactccaattacaaacaaccctcctgtaattgcaccactgcctacttataatattcctaaaggaacggcatttgttttaacagcttctgctacagatgctgaaaatgatccgatgacatattgttgggagcaagtagataacgccagtgtaacaattaataagaataacttaggaactactgcaagtggtgctacgttcagatcatttaatccaacgacaagtccaacaagatatttccctaaattatcttctgtattggctggagttttaaataactctaacaatggatgggaatctgtttccactattgcaagaacaacgaatttcagagtaacggtaagagataataatccggttcctactcaacagcaaaccgagtttgccaatcagcagattattgttggaaatgacggtccgtttaaagtaacgacaaccaatgcctataataatggtgcaacaaacgtaacttgggacgtagttaataccaccgctgctccatacaatgtcgcgaatgtaaaaattgattacaccacagataacggagtaacatggacagtagcggtagcttcaacgccaaacgatggtagtgaatctcttaacttaacaggtcttactgttggaggaacagttaagatcagagtgagttcaataggaaatgtattctatgccatcggaagtgcaacagtaacttctttacttacttgtaccggagcagctcctacaggtattattgtttctgcgattacccagactacagctacagttacctgggcagctactacgaactccacgtatgtagttcgctaccgtccggtaggaagcacgacttggatcacagtgaatgctgcaacaaactcaataaaccttacaggtcttactgatggtattcaatatgaagttcaggtttctacagtttgtaatggagtacagggaccattctctgcttctacaaactttacgactttaggtcttacttactgtacaatgacatccagtaactttgcttcagagtatatctctaatgtaacggtaacacctgtaggtgctgctgtaatgagtaataactctgcgggatctacttatactgattattctgctactccaagtgctttggtaaacttagtaatcggttctacaggaaatactgtttctgttacaaaattcttcccaggtacagtatggagcgaagcagtaggtgtatggatagactttaacagaaatggagtttttgaagcgactgagcaggtaatgaattcaccttcaagcactacaactccagtttcagcaactttcaacgttcctgcaacagcttacaatggaccagcaacgacaaggatgagagtagctatgagatatatcacatctcctgtaatgtgtcaaagttttggtgatggagaagttgaggactacgcggttaaattaattcagcctattccttgtacaagtaatgctccattaaatctttctgttacaaatattacagcaacttcagcttatgtaatgtgggatcctgcaataggagcaacatacatattacaatacagacaggtaggctctccaacctggattacagttcctttaacaacaaatgcttacactataaacaaccttctggagcaaactcaatatgaagttcaggtggcgtatgtttgttcaggaactacaggtacgtttactgctccttatcagtttacaacgccggcggtaacctattgtaatattacttctacaaataatacgaacggttatatttctaatgtgacagttgctccaacgaattcttacgtaatgagtaataattcaggagccaattcatatacaaactattctccggatccagccaaattggtaacattggttcgtaactctacgaacaacacaatctctgtttctaaatcttggctaacaaccacaacatcttctttagctgttggtgcgtggattgactttaacagaaacggtatttttgaaacaggagaaagagtaatcagtactacagcaagtacaacaactcctattacggctacatttacagttcctgcaactgcttataatggtccgttaacacttagaatgagagttattttctctacttctacaattacagatccttgtgcaacagttgcaaacggagaaattgaagattatgcggttaagattatagatcttgctgcttgtactacagctcctccaactcctgttgttgtttcaaacgttacagcttctacagctttggtttcttggatcaatgcaacaggtgcaacttatacattaagatacagaacaggtactggagcatggactgtaattgctccggcaactaacccttacactattataaacttaaatgcagctactacttatgaagtacaggttgcaactatttgtggtggtgttacaggagcttggtctgcttcaactaactttacaacgcctgcaatttcatattgtaattcaggcactgcaactgtaactgacggatacatcaataatattacggttacaggtacgaatacaccgatgatgtctaacaactccggacctagtacctatacagattattctaatgatgcaacaaagattattacattagctcgtaattctacaggtaacgtactttctgtaggaagaacaatcttatcaagtacatattctacttatgcctggatagattttaacggtgatggaatttttaataacaacccaacaacagttgctggtggagaaagaatcatgaacttagggtattcttccacaactccggttactgctactttccctgttcctgccggagcttattctggtacgaataaagtgaaaatgcgtgttattgtatatttcttaacacctacagatgcttgttcaccacttacaagcaacggtgaagttgaagactatcaggttaaatttgtagacatccagccatgtaccacggctgctcctactggtattacaatgtccaatattgcagcaactacagctacagtatcctggatctcttctaccggggcaacttatttggtaagatggagaactactaacccagttggaacttggaatacatctgctgtaattacaggaaatacgtataacattaccggacttactgagcagactgcttatgaagttcaggtagcaacaatttgcggtggagttcagggaccttggtcaacgtctgtgctgtttactactacgccaattacttattgtaatatgacgggtactggaacgactgactttatttcaaacgttacaataacttctgtgaatccgggtattcctccaatgagtaatacttctgtacagacaaattatatcagctataccactccggcaacattggtgaacttagaaataggttctacaggtaaccagatatcagtagctaaaggcggagcacaaaatgatgctgtttcggcttggatcgactttaacagaaatggcgtatttgaaaccacagagcaaattatggcttctgcagcaagtactacaactcctgttacagcattgttcaacgttcctgcaacagcatataacggacctttaacaacgacaatgagagttgttcttaaacgtacaagtgctcctgttatgtgtcagaatgcagtaaatggagaagtagaagattatgcggtgaaattaagaccttgttctactacaaccccaactaacttagccttcaatactattacgcatacttctgcgaatgttacatggacagtacctacaggtggtcttacatttatcgtaagatacagagtagcgggaactcctacatggactcaggtggttgtatcaacacttacaggaaaccctccattggctttaacaggtttaacgcccgctacaacgtatgaagtacagatagctggaagctgtggaacaactcctggaacatttacaccaactcagacattcacaacaagatgtgatccaacccctccgaatgtaacaatcggaacggttaccacaaattcagcagtagtaacatgggctccagttgtaccaagtgctacttatgtaatcagatacagaattgtaggtacagcaacatgggctacaatcaacgttactgcagcaccattaaatacgtatactcttacaggtttaagcccttatacaacttatgaagtacaggtggcaaatatctgtaacggagaaacaactgttaacccttggtctaatcctaaagtatttactacggaaagaacttgtcagttgcctcctccgggacttactattacagcgattacaccgacaacagctcaggtaacatgggatcctttcccgggtgctacttatatcttaagatacagaaaagtaggaattccgagctggacaatggttccgtctaataccaatacgattacccttacaggtttatctgaattgacacagtatgaaatgcaggtagcaaacgtttgcagcggaactccgggaacgtatacactgccgtatttcttcacaacgccaacgattgtttattgtcaaatggcatcaacaggagctataacttcagaatatatttctaaagtaacggtaacaccaaacggtaaacctcagatgacaaatatttctgtaggatctaattattcagattatacaggagttccggctaaatttatcgaactgatccagggatctacgaacaacaagatcgtgatcgataaaaaactagcaggaaacaataaagcaggagttgcagtctggatcgatttcaacagaaacggatacttcgatatcaacgaaagaatccttgctgacggaccaaacagcaatcctacagcaagtacgacgtttacagtacctgcagatgcgttcatcagtctggtagactacaaatatgtagtgatgagagtggcaatgggcaaagatattattccggtaaattgtaacagcttcccagatggagaagtagaagattacacggtaagaatttctaaacttccggttgctaattcgatcaatcagacagatgttatgatttatccgaacccggtgagctcagtattgtatgtgaaaaatatcagcaaaaaagcgaattataagatctataattcagcaggacagttattgtcaagcggtattatcttaaacaacaagattgacgttcataacctgataaatggactttatgtaatagacatcttggatggagataccatttctgttcagaagaaatttattaaagaataatacatttaatcattaatcaacttaagcaggctctcagaaatgagagcctgtttttttacctgaagaacagaagcatgaaaaaactcgttagaaataatccaacgagtttaatgttttattcgatatcgaagacgatcttttcggtttgttccttgagatcttcaagattggtattgttataaataatgcagtctgcaagttttattttgtctttttccggcatctgtttttccatcactgcctgaacttcgcggtaggtttttccgtctcggtccattactctttttattctgatattatcttcagcggtaacaagtaaagacttataacattgctggtttaattttaattcaaacaataaagccgtttctttaaataccagatactttgtctgttttttcacccactcttcaaaatctgttcttacagcaggatgaataatttcatttaagctctgaagaagatctttatcgttaaaaaccttttcagcaacaaatttccgattataaaatccgttttcgtcataggcttcatctcctaaaagttccttgattttcagctttaaatgattattgtcgttaacaatatctttggctctgtcatccgaataataaaccggaaatccgaactcttcaataaatttggcaacagtcgtttttccggaaccaattccgcctgttaaaccaataattttgggtgcagataagggatcaggttctgctttctgagtttctgaatgtaattcctccataatcaaaaatcaatatccaaaaacatcattaaaactaaacgtctcatctaatcttacccctttctcagtcatcttcaggcttgctaattcgttgtgtgcgtcatgctcaaagaacaacagatattcattatccacacactgcttaagaaatttacccttttcttctaaagttaaaagaggacgcgtatcgtaacccatcacataaacctgaggaatgtgtcccgcagtcggaattaaatctgccgcgaaaacaattgttttttcctgatactgaatcacaggaagcatttgcttttccgtatgaccatccacaaaaatcacatccattttcaaatccggtgcaaaaccataatttccggttgcaggaaggggtaaaaaatttaattgtccgctttcctgaatcggaataatgttctccttcagaaaactcgctttttctcttgcattaggttccgttgcccatttccaatgattttcattcgtccagaactgtgcatttttgaaagcaggtctgtaagctgttttatcatcattccattcaatcgcgccaccgcagtgatcaaagtgaaggtgagtaaggaaaacatccgtgatatcctctcttacaaaaccatatttctttaagtttttgtctaaattatcgtctccccaaagcgaataatgaccgaaaaatttgtcgtcctgcttatttccaagaccacagtcaattaagattaatttttttccgtcttccacaagaagagaacgggttcccagttcaatcaggtttctttcgtctgcaggattggttttttcccacagactctttgggacgactccgaacatcgctccgccgtcgagcttaaattttccgcattgtattggatatagcttcatataatattgagttttttataatgttgtttattttttatttgaatgaaaatctaaattttacttcgaaatcaagttaaacttaaaacaattcacccggatttctcggtaccgcaatattcagatgtttgtatgctttttcggtaacctctcttcctctgggagttctgatgataaatccttcctgaattaaaaaaggttcataaacttcttccagagtttcagggttttctgcaatagatgttgccagagcagagattcccacaggttttcctttaaaattttcgatcatgacacgcatgattttgttatccatctcatccagaccaaattcatcaacgtttaatgaatttaaagcatattttgtaatgttgatttcgatttctccgtttccttttatttctgcaaaatcccttactcttctcaaaagagcattggcaattctcggtgttccacggcttcttctggcgatttcaattgcggcatcttcataaatttttacgcccagaactcttgcacttcggataataatcatcgacaaaagttcaatggtataatattcaagtctgctttggattccaaatcttgccaacattggtttggtcagcattccgcttcgggttgttgctcccaccaaagtaaaaggattcagcccgatctgtacacttctcgcattcggaccggtttccagcatgatatcaattttataatcttccatcgcagaatacagatattcttccacaacaggagaaagacggtggatttcatcaatgaaaagcacatcattttcttccagattggttaataaaccggctaaacttccgggtttatccaaaacaggtcccgaagttattttgcagtttaccccaagttcattcgcgatgatattagccaaagtggtctttcccaaaccgggaggaccatgcaaaagaacatgatccagcgctccgccacgcctttttgcagccgtcacgaaaacttcaagattttccaatgtttttctttgtccggcaaaatctttaaaactctggggacgaatctgctcttcctgcgcaagttcttcgcgggaataattttctttatcgggatgtaaaaaatcgggcattaattcaatttcatttaccgtaaagataggaaaattgaggtaaaaattaagattgaggctgagattaattttagtggaattctgaggtttaagtaaaggttatggggaagtgtatttgtgatttacaatattgatatattttaagtatttttgagaggcaaatagtaataacaaatgataaaagattttactgagatgcccgtttggcaaaaggcaatggatattgctgaaaaatgttttaatatgtctgaaagtttacccaaaaaagaagattatgcattgacttcacaattaagaagatcagcggaaagtatttcagcaaatattgctgaaggttttgggagaagaacagcgaaagataaaagcaggttttatgatatttccagaggatctgcatttgaaataaaaagccatttgatatacggaagccgagtaaaatatttttcagaaaatgagtgcttagaaataaaaaatttaattaatgaagttgtacatgatttaaataagaaaacaaatcatttaaacagagttcatccttaatctaagcctcaatcttaatcttatagtaatgaaactaattggtcctttcacgcaggtagtaacacttgcaaaccttcctttaagaggaaaactttcagacgaacagcttgaaatcattcccgatggaggaattttaatcaataatgataaaattgagaaagtcggaaactttgagattctaaaatccgaaaaccacaatatagaaattgaaacggtaaaaggagagcaggttgttcttccggctttcgtagattcccacacgcatatttgctttggcggaaaccgtgcgaatgattttgccatgcgtaacgcaggaaaaacgtacctcgaaattgccgaaagcgggggaggaatctggagctcggtgcagcatacaagaaatgcatcggaggaagaattgttaaaaactttgctggaaagaattgattttttaatttctcttggaattacaaccattgaagtaaaaagcggttatggtttagacgctgaaaacgagctgaaaatgcttcgcattattaaaaaagcgcaggaacagacgaaagcaactctggttccaacttgtctttccgcacatctgaagccaagagattttgaaggaagtaatgaagagtacttgcattatattgtaacgaaaattttaccgaaagtaaaagaagaggatttggcaaagcgggttgatatttttattgaaaagtcagcatttcagcccgaagaaagcagagattttttgttaaaagctaaagaattgggtttcgaaattacagttcatgccgatcagtttaccccgggaagttcgagaatagcagttgaagtaggcgctaaatctgccgatcatctggaagcaaccattgatgacgatattgaatttatagcaaaatcagatacggtagccactgctttacccggtgcaagtttaggattgggagaaaaatttacgccggcgagaaaattattggacgcaggagcgattgtagcgatcgcaagtgactggaatcctggttctgcgccaatgggaaatttaattactcaggcttcaattctggcaacatttgaaaagttaacgacagcagaagtgttagcaggaatgactttccgatcagcttttgcgcttggtctggaagatagaggaagattaacagaaggacaaaaagcggattttgtgacttttaaaaccaataatttccagaatgtcctttataatcagggaagcttaaaagcggagaacgtctatattgatggtaaattattataaaaactttgccatgctgaagggaattaaaaatctggtaatttatttcgtacttcttataatatcattaaatgtactttctatcttgcaagctctttgggttaatattggaaatataaaaaccggaggacagtttttgaatcttatatattcaggttttgtttttataagttttcttttattaatattgatatctttttatttcttaacaagatgtgtgtttagtattttccaaatattaaaaagtgtaatcataaatttagttggcaggattaaataattaaattataaagctaaaaattaaggttagatgaaaaagataatcattcatttcctattgattttagtatcaataatattatttgtttttctgtcttttgttggcgtttttacagtttttacagagaaaatagaaagcaattccaataatattttaaatgcagctattttaataatttggttcatcgtatttattttaataatatattttatcattaaattcctcataagtatttataggtataaagaataacaaaatcacaaaacataaattagtatgaataatatttggcagggaagattagacggagaagaacttcttttccacagaatatttcagagggtaaaagaagaaaataattatgatcttatttcacctaaagatttcgttttacatggatttgctgtagatgaaggcgttagacggaataaaggaagacagggcgcaaaagatgctccggatattatccgtaaaaatatgtcgaattttccggtgatccgtcctgatttttctttgctggattttggaaatattacctgtgaagatgggaatttagaaaatacgcaaaacagtcttgctaaaaatgtttccaaagtgttgttgaaaggagggagatctgtagttttaggcggaggtcatgaagtcacttatgcacattatttaggcttaaaaacagcttttcctgaacagaaaataggaatcattaatattgatgctcattttgataacagacagcctgaaaatggagtaggagcgagttccggaaccggattctggcaaattgctcaggaaggtgacattcattcgctgcatatcggaattcagagaaattcaaatactttgaaattatttgataccgcccatcagtacggaatgaaatatattcttgccgatgaacttttctttgaaaatttaccttccgtttaccaaagaattaatgatctgctcgacagtgtagattatctgtatcttacgatttgtatggatgttttcaacgcttccattgctcccggagtttctgcttccgcttataacggaatttttgctgatgccgcattcatgcatttttacagacatattctgaaaagtgaaaaacttttggcactcgacgtcgcagaggtaaatcctcagtttgacatacacgaaagaactgcaagattagccgcaacacttatgaatgagtggtttatgatttaacataaaaattaacaatattccgatagaaaaaatcattattttatataacccgaaggaacaggatttgttgcttccaagatgcttgaagaaaagcattaattaaattcggcaaagactgaatttaaaaacagaaattatagtatggaacaattaattgaaaataaacttatcaaagcagataaggcattttcagaatggagaaaagtaccattcgaagacagacagaaactcattgctaaagcggcggaaatcttaaaaaacaattctgaaaaatttggaacgatcattactcaggaaatgaacaaacctatttcagaatctgttgctgaggtggaaaaatgtgctttaatgatgaattattatgcagatgctgaaaatattttaaaaccagagaaaatcgattctgaattttcttattctgaagttcattatgttccaaaaggggtaattttaggagtaatgccttggaatttccctttctggcaggtcttgagatttgccgttcctgccattttagccggaaataccgttgtattaaaacatgcttcaatttgttttggaagcggaaacgctatcgaagaagtacttttggaagcaggatttccggaaggaattttccagaatcttgaggtaagtcataaagaagtaaaaggaattcttgaacatgatgcggtaaaaggagtcagtcttacaggaagtggaaaagccggaggagaagtagcttctattgcaggattaaatatcaaaaaatctttgcttgaacttggcggaagtgatgcttttattgtactggacgacggagatctggatgaagcggcaaaagcaggggtaaaatcaagacttcagaattgcggacaaacctgtaccgcggcgaaaagattcatcattgatgaaaaaattgaagatgcctttcttcctatatttattgaagaatataaaacatatgaggttggagatccgatggataaagaaaccaaaattgccggaatggcaagaccggatctggcagatgaactggaaaaacagtttcagaaagcactggaacatggtgctgaaatcattcttcctctggaaagaatttctgaaaatgaattcagacccggtttaattcgtgtgcaggaaggaaatcctattctacgggaagagcttttcggacctttgggaatggtgatgattgctaaaaatgacgaagaagctttaaaaatggcgaatgatattccttttgggctttctaattccgtatggacaaaagatcagtcacgacaactattcttcatagaaaatcttgaatcgggaaccgttaatatcaacagaatgacaagttctgatccgcgttttccattcggtggatcaaaagcttcaggttacggaacagagctttccttattggctttacgtgaatttgtaacggcaagaactgtggtaggaaattatgagtagaagggaagtttgaagaggggagatggaagtcctgcttaatgagctttcaatatttattctttccgcttttggctctgaaaaataaaaaaactcacgaataaatttcgtgagttttttgtttataatgactttgtttaaattaaactgtcgttaatcttaaggtatttgtttttccgccttcgtaagatggagttgcattgatgttgatgacaaagtctcccgactcgatgtagccatagttatgcgttaacatatttacctggataatcgtttcatcagtagatttcttcatatcataataataggcgtgaactccccaaagaagattcagcatggtaattactctcttgtttccactgtaaacaataatatgagaattcggtctgtgagctgccaattggaacgctgtatagcctgaacttgtcagtgtaacaattgcagagacattggttgtttttgcgattcttacagcggcaagacaaactctgttggtgataaatcgatcatcaatacagttgaaatctttttcgataggctcgtttttgtgctggtaaaaatgagtagtttcaatgttcttcacaattttagccatattttccactacctgaaccggatatcttcctacagaagtttctcctgaaagcattacggcatctgctccgtccaatacagagtttgcaacgtcatttacttccgctcttgttggcgttaaactgttaatcattgtttccatcatctgggtagcgataattaccggcttggaatagaatcttgctttttcaaccagcgttttctggatagcaggaacttcttccatcggaacttctactcctaaatctccacgtgcaaccattaaaccgtcgcattccaataaaatttcttctatattttttacaccttccggcttctcaattttcgcaatgatcggcgttttgaattttccgttcggatgttttgaaatcaattctttaaggtcgatgatatcctgtgcatgacgaacgaatgaaagagcgatccagtctacttcctgatccagcatgaaattggcatcctgaatgtccttttccgttaaagcaggaagagaaacattcgtattgggaagatttaccccttttttagaactcaatggtcctccctgaatggttttcgcttttacagtgtctaattcattggtttcagtaacttccaaaacgagtttaccatcatcaataaggattctttctccaaccttcacatcctgtggaaactgttggtatgtcatgtacacttttgtagaatctccttcaattttttcgttggtaaaagtaaggatgtctcccggattaaggtaagaaccttcctttacaactcctactcttagtttaggaccctgtaaatctcctaaaataccaaccgagaagccatattctttattaagttctctgatgatctcgatatttgaacgaactaagtcgtaatcagcgtgtgaaaaattgattctgaaaatatcaacacctgctttcattaaccctaacattacttccttcgacgacgaagccggaccaagcgttgcaataatttttgtcttctttaaatacttattcataatactggataatttgataaagttcttcctcagaacctaatgtataatcttgaatcggaaacacaagattttcagggagcaaaattacggaaaaatcaggaaactgttccgaactgtgcaaaatatattgcacttctacctgattatttaataaaaatttaatgttttcttcttccgagaagagttcagtctgtaattttttttgtttactttctgcagatctgttcgaaatgaaggtaaaacaagtctttgtaaatttgtggtaagcctcaaatcttggaaaaaagtaatcataataagatccgtgaagaataacatcttcaatccttttgaatgtaagatcgttgttttgatttactttatagaaaaactcatgatcgggtatattctttgctaatcttaccaatccgatggtaatatcttcaaattcaatatcatctatatcataaagtctttggatttccaagtatattttcttttttgtttaaaatataaaatgctctttgggctgccttttcttcggctttcttcttggaagtttctgtggcattcgcgattttttcttctcccagccatacatgacagcggaaaacaatcgatttatttacctgaatttcttcgcaagtttcgtactttatattcagtttcttcttctggctccattccagcagaagacctttgtagcttacaattttattttctagtttgttaatttctgtaggtgtcagtaatctttccagaatgatctttttacaggtttcatactggaagtctagataaacagcaccaattaaagcttcaaataaatttccggagatgttttcacctaaagcaacaacagaattttgtttctgcagaagattggtaagttttaagtcttctcctaatttattaagatttttcctattaacaatcttagatttcatctgcgtcagatatccttcattggcttgaggataggtgtgaaacaaatgacaagaaataattgtacccaaaacagaatcccctaaaaattccagcctttcgtaattgctgtctttatttttagaagaattttttaaagaaaaagcttcgcggtagagggcaacattttgtacctcagttccaagcattttgctgagttcagtaatgagaaaataatctctctccgttaattgtctttttctttttttgagaaggaatttagaaaagtatttctgtaactccattcagtagatttagattttcttaaatagaacgcaggcattgtgcccaccaaacccaaaagtattactcatggctacttttacatctttcttagcagcttcgttgaatgtgaaattcagtctgctatcgatattttcatcatcagtaaaatggttgatggtaggaggaacaataccatgaataatagttcccaacgcagcaatagcttcaataactcctgcagcacccaaaagatggccggtcattgattttgtagaattaatctgaatatcgaaagcgtgctctcccaataattttgaaatggcattagattctgcaatgtctcctaatggagtagatgtaccatgcatattgatgtgatctacttcatcagcagttaatcctgcatcttccagacagttcttcattacgagataagcgcctaaaccttcaggatgaggtgctgtcatgtgatgtgcatctgcactcagaccgccgccttttaattctgcgtaaattgtagctccacgttttacggcgtgctcatattcttcaagaatgatacatcctgctccttcaccaagaacaaatccgtctctgtctttgtcgaaaggtcttgaagcggttttaggatcatcatttcttgtagaaagtgccatcattgcattgaaaccaccgacaccacttgctgtaacggctgcttctgagcctccacacacaataacgtctgcttttccaagctggatcagcattttggaatcaattaaagcgtttgctgaagacgcacatgcagaaacagtagtgtaattcggaccatggaaaccatactctatagatatatgtcccggagtgatgtctgcaatcattttaggaataaagaatgggttgaatctcggaatttccgtatttgcccatcctaaaacttcagtctcaaaagtctctaaacctccgattcctgaaccccagattactccgactctgtttttgtctacgttatcttcaataattcttgagtgggttactgcttctcttgcagcaacaagcccaagttgtgtatttctatccatttttttagcctctttcttgtcgaaatggtctaatgaattgaaatttttaacttcgcaagcgaacttagttttaaagtttgtggcatcaaaaagagtaataggagcagcaccgctctcacctttcacaagattttcccagtattcttttgcattatttccaattggtgttattgctccaaaaccggttacaactactctttttaattccataaactttgtttaattttcttatttgttgaagaatattatttatttactacttcttcgatataagcgatagcgtgtcctacagtagtaattttttctgcttgatcatcagggatttgaatattgaattctttttcaaattccatgataagttcaactgtatccaaagaatcagctcctaaatcgttagtgaagctagcttctggagttacttctgtttcttcaacgtcaagcttatcagcgatgatagcttttactcttgatgcaatgtctgacatagtaaatttttttttaattgttagatggtgcaaatatataaaattctttacgataaaacatttttttagtcttttttgtggtttgcatgagagtattttgtaaattgtgggtttagtgttttagttttcaggggtttatattttaacgtttcattgtcttatttaactttatcattcatcattttttatcctgaatacagaatccgtctgattaagcattttaaatggtattttttatatcagagctttattatttatacttttgcagcttctttttattttatatattctttgttttcatgagaaaaatcctttttatccagtttcttttattctcaatatttattttttcacagacggaaggtaaagtaattaggataaaagacggcgatacgttagttgtgttattatccgacaataccgaggaaactttaaggcttgcggaagtcgattgccctgaaaaaggtcaggcttttggtaaaaattccaaacaatttaccagtgatgctgtatttggcaaaaaagttacattttacagaacggcaaaagaccgatacaaaagaactgttgccaaaattttttatgatcataacaaatatctttccgaagaaatcataaaggcaggtttcggatggtggtattttaaagcctctaagaatattgatctgcaaaagttacaggataccgccaaagcaaaaaagcttggtttgtggatggataagaatgcggtttcgccttgggaataccgaaagagcaggagtaagaaggtggcgggcaataaaagtaaagctctttaatatattactaaaaaataaaattgctgatagaattaagtttctaagagttaatactggtttgtcccaatccgaatttgctaaaaaataggtaatgcggtcaaaaatatgaaattgatagacaaatattaaatcgttgggaaagtaaaaacaataaaagaggactcacaatttatacgatagcaaaattttgcggcttgtcgggaatttctttaaaagaattttttgatttttgaaaggtagaattaactattaatctgcctactaaaacaataaagtatttcctactttttgcagtcgaatttcaaataaaatctaatggcttaaaatcaatctcctcgccagtggaattatcatatattttgaacacaccttctgctaaccatataactttaatattttctactgtacaaaattcgattaaacttatttgaggtttttgagaatagactaaaaactcttttatattcccatattccatctgtctgtttactatggaaaatttataatatttaagttgtccaactcctttaatagtctgtttttcttgatcggatatagtacttaaaatggttttaatttcaaatactagagcggtttgtcctaatgttgacaaacaatcaaattttccctcataaagttcaaaacctttttcttcacaaaaaaatccgagccttcgcacaatttgttgatgttctgccaatctttgttgacgaatccttatggactctgtataatcaatacttacagttgaaatcgtattaaagatcggatctgtagcaatatttccagatgttacaagtcgatattgcgaataattaataccctcctgatttattgcttcaggtggtatttcagtcgaaatctcgtcttcagttattacaagtctgcctactgggtaagaatgattacctcgtcgtgaaatatctcctaattgttctgcaattcctgggagaatcttaacagcattctttgccatagaagctgaagtcccagttgattggagtatttcattaagcgtgagttctgaaagagctattattctctcatattcttctggtgaatcgttttcggcttctaatgacaacattaatttgtttgtctctattcctgatttgtcttgaactagttttagtaagattctatatggatgacttatttctccgtctgttccttccaatcctaattgcataaaagaatttttccatagttcttttttaacaagttcatttggcgatgctaatagctcaattgcctgcggacttaaaacgccagatttatcctcataaactgtcaaaaaccccaaaagctggaataaacgtctaatatctctagctactgttagatagcctctattagctttaggttttccttcttctaacgcaagaaattgttcgatagaaagtgatttgtctctgtaagtataaatcccatttcttgttagtaactctccaaaattttcatcttttaaagcgatttcctcatcaatcagttgttttacagataataaagcattgaaaagtttttctaaatcattgaattgatgtgggaaatttttcatctatattttggaagttaagtttcaacaaatatactatttgttttatttagtagtttattttgttggtattcttttagttctttcaatcgttgatttgctattttaatataatttttatttttttcgaatgcaatgaatcttctgttattaattattgcgctaacgcattcgctgccagaaccaccaaaaggaatcaagataagatcgccttcattagaaaaatgtttcactattctgtcgcatatcgccaaaggcttttgtgtcggatgatcaactttttcattggcaaatcttttacctgctaatactggaatgttccaaacatctcctgcgtgtttaccctcaggatgcggtgtccacactttaccgtttttggtgattttattttttaatcgctctgtacttttataaggttctctgatttggtgatatgtatatgtttcagtttttgaaaaccacagtataggttcataatttgctgaaggtgaattcttatatcccgaaaaaccattctcgtaataccaaattatttgtcttctgtattttaaatctttttgatataaataaacgtgaagatggcacaggtaatgatgaattccatatacaaaaatggagcctgtaggttttaatttagttattgctacgtcaagccactcttttgaccatttaacccattcttctacgttattccaattatctgatgaatttccaaaatctttatttagattatatggaggatctgcaattattaaatctattgatccatcgtcgattttttgcatttcttttatacaatctccttgatgtatcttgtttatctcaatcattttttttgatattttgaaaaattaaaacattttgatggtgcatatttggtacgaacgaaaacgggtagccataaggataaatacttttgtgtctttgatataatattttaattcctttaagcacaaaatttccttttttttccaattcattagctaaatcagcgtgaaaagtatagtatttttctttttttctaaaatcgcttactattatacacatatattttccagattttaacggcttggagcaatcatcaaaaaagcttgcaagagttgagagaaatgttttgtaatcgctaatatttgctaggtcttcactgttatcactatacttatggtctagattgttttctactcgttctttgcctttgtgatcgactgtctctaaaatgttccaatatggtgggcttgttataacaaaatcaatctcgttttctttaaattttttaatttctttttggctgtttccgttaatcaacttttgcttctctttaaatggataattatttggaacttccagttcaattcgctgaactcctagatcgtgatattttgggtttaattctataccatatccaattctgctattgtaagcgcaagccttgacagttgatgctataccagaaaatggatcaaggactttgtcattttcctttgaaaaaaattgtatcagccttcctacatcttgaaaagaaaaaggtgcaggatgttgtttttcaatttgtgcatccttgttacttgcgcctaatcccttttgactaaaaactgttattgtttctggtaaccactcttttgcagttaaatcatttaatccattatttaatgcaaatgcagattcctcattaggaaaaaggattgcattagctttctctgcatcccctgttgagtgaaacaaagcaacttcatcccaactttcaataaatctacttgggattctaagttcaactctatttttaaaaatttcattaagcttgatttttgcaagcttgttttgttgaacatctttaacaggaacaatctccttcctctcttttttatatagttgatatttcatttaatttttttctctaatttcaattgttgcgctgcaacttttagcgcattcataccctcttcttcatctttaacgagatcataaacttttgaaccaatccataatgcttctaattcagagcacgaacaattgaaagttttactaatggttttaaggtgttctcgcttaagtatcttttggtcagtttctactttgctcaaaaagccgtccccaacttcaagtattgaagcaagctgcctttgaagcattcccttagattctctcaattctcttattttttgcccaaacgtcactttactaaatttagacttgactaatattggtcaaatatacgaaagttttatttactcacaatttattaggcaaaatatgttcaactatttttcaaaagtattaatttattgaacaataatgaatgaaaagctagcacctaatttagcatctgctaaagtaaaaccctgtaaattattaatttacagggttttaagtggagttggagggattcgaaccctcgtccaaacaagcaatacataagctttctacatgcttattctgctattgattttcgacgggaagcagagagcagacacccaacttccggcttatcttctgaggttttcgagctttagccgaagcgtctaaagccttatttccgcattcctatatcccagaatcaaacgccgcagaacagagcatttgtggaatatcttgcttccctactaacatcttcgggaaaacgcttgatctactatacttcgatattaagctgcaagagcgaactcttcgttgccagttaaaattttgtagcaagggattatagagatcgcgctacggttctctgcatgcttacttacccattgaccttgctgtcgaaaccagtcaaccccatgaataaagtgaatgcaaagataacacttttattcaaattcagttcatattctttcagtcattttaataatgggattttatgtattttatttgaagctttatcctgctttccgttgcaattcctcattacgcggctccgcttcgctccgccgctccattccgggattttctctacaatcagggctaaggtggaagtggatagtataaatgatagacgaaaaaaaacttttaagcaaagaacaaaaacctgaacagcaaaaaaataaccctcaaaaaaacaaaaagtgtcagaaaaaacccgacacttctataattcatctaaatcctttcctcaattttaatctcaatctcaatcttaatctcaatcttaacttcaacctcatcaatccctgtttttcagtaaaatccatcccgaaagctgaacaggctttttaatgattttatcttcccactgtaatttataccagtacgttccggttggaagaggtcttccgatgtattttccgtcccagatcggcgttttggtggtcggtcggaaaacttcttttccgtatctgtcgaaaatcccgccctcaaaattaccatatttgctgatctcgctgaaatcaatcacatcgttgcttccgtcactattcggagtaattacgtttgccataaagaacgtataatattctgccgtggtatcgcaggttgcccctctgtttcttactcttattgaatatttcgtattttttagcacctggaaagtgttcgaagcctgccaagttacgcctccgtctatggaatactctataggtacatttccgttattttgtacaataatcgttaaaaatggatctttgtaagtgatttctttaatttgaggagttacaatatatcctaccgttgcagtaaacgttttagaacagactccgttactgatggttaccgaataggttcccgctgtgtctacattgatggtttgagaagttgctccggtattccatgaataagagtaattcggaccgcttcctgcatccagaatacctttgtcacctttacagatttcgatatttttcagagtagaaataatttccggaacaaccgtgatggtaatcgtagcaggagtcgttgcagaacagccgtttgttccgattcctgttaccgtataagttgtagtggttgtcggggaaacaatctgtgtgttaccatttcctgttaatcccgtccatgtgtacgttgcggcacccatcgccgtaagagcaatagactcacctttacaaattgatagtttaggagctgaaacgcttatgatcggcgctgtgatatttttaataaccgttacagaaccttgttttacgcatccgttggaagtcgggcttgtaatcgttaaagtataagttcctgaattattaacaaccggtgttaacgtattggctccggaaacaatatttcccccacctgcagcggtccataagaaagtagatccgggttgataaacagaagtcgttgcgtttaaagtaacctgagcatttgtacagttaatttctgccggaggattaatattaatgacgatggccggatccattgtcacggttacagatcttgtatattgacaaccgtccggcgtagttaccgttactgtataaattccggaagcatttactgtggttgtggcagttgtggctccgtttgaccatgaaaaagtatttcccgttccgtttgcactagctgttaaaacggttgaagcaccttcgcagaaatttaaatttccggaaatctgaacattcggatctgttccctgagtgatcgtaacggaaacaggatcgcttgtgcaggttccgttattataggttaaagtataggttcccggagcagatacgctgatcgactgtatcgttgcaccgtttgaccatgtgtttcctgttgctgaacccgaagtaagggtaacaggattgttgttacagattacattcgatgaagcagtaattgtcggaattggttttacattaacaattaattgtaattctgcaattttcgaacacgagcctgattttaccaaaacataaatcgtagcatttcctgaaatataagccgaaggatttgcaatcgtattgctgtttccggccaatgcatccgcctgattcagataataactgaatgttactcctgtcgttgtactgatgttcggttgcgctgatgttaaattaaatgttccggtattgttatttgaacagacacttaaagatgaattttgtacaacaggcactgctccctgaactactgtcacagattttgtgtactggcagttggcaggagtatttacagtcaccgtataagttcccggcactgaaactgaaattgaatttcctatggcacctgtagaccatgaatatgtatttcctgttccgttagacgttgctgttaaggttgtcggagacccgcagacaattaaatttcccgtaatctgaggatttggatcgctttctgcggttaatgttactgaaaccggcgcacttgtacatattccgttggtgttggttaaagaataagttcctccggatgtaacggtgatggattgtgttgttgctccggtagaccatgtatttccggtcggaacacttgaagtaagcgttacatttccgccaaaacagatcgtcaaagatgaacttgtaatcgttggagaggcaagctgggttacattgagctgaagcgaaactacctttgagcacgttgctgtttttactcttacataaatagttgcgtttcctgatgtataagcggtcggcgttgcaatagtatttgtattcccggcaatggcatctgcctgattcacataataatcaaaagtaactcctgaagtcgtgcttatgttggtctgtgctgttgttaaattaaaaattgctgtacttgtactggaacaattggttaaagtcgcattttgagcaacaggaaccgcgccctgtacaaccgttacggattttgtgtattgacagttcgccggagtttttacggttacggtatacgttccgggagcagttacggtaattgaaggagttgtagctccggtagaccatgaataggtgtttcctgttcccgttgaagttgcagtaagaattgtagaagtattttcacacaatgtcagatttccgctgatctgcgcatttggatctatgtcctgggtgatggtaacggaagcttgtggactcgtacagattccgttgctgctcgttaaagtataggttccgggtgtagttacagtgatagactgggttgtcgctcctgtagaccatgtgtttcctgtcgcattgttcgatgttaaagtaatatttccgttagggcataactttgtggaggatgcagttatagatgccgttatacttttgtctttaaaaacgatagcattcgtttgtttacaggaattaatagaattattgggattgttaggatcctgataactgatgttataataataggtattgctcgtattgacagtaataggtgcggtgataggatttgttcccgtagctgcattgttcgctgtactgtaataggaaacataaaaattaggatttccgtttaatattcccagcgataaggtactgaaattaaatgttgcagaacttccgcaaatattgatttctctcggagagcttgcagttggtcccggatttcccggcggcacaaaaggattgggagctatcgtggaattggtgaaaggagatacaaaagttgccgttcctccccatgttaaattaaaagtgtaaactgttgtagaccagttgtctatgtataaatagtacgtctgacccgcaacaacatccatatatttacagtaaggatctgtatttcctgcgccggatgaggtattggtattcgtcatgttcatccctgtatcggtataatatccggaagcgttacatcttaccggagttcctctgttggagcaggttacattcggtccgtaaatcgcccagtcataatctaccggtccggtaggagcgaggtcaaaagtaagtgttccgctggtggcaatcgtaaatttataccaaaccgagtggttctcgtaagaaaggcatcctcccagagtttcattggtgttgccgattcctacaggagtataattaatgcccgaatttccgcagacggtaatggcggaaacgcaatcttcctgtgaaaacacaaaaacagaaaagagcattacgatagaaaagagtaattttttaagcatgttaaagggaatatggttttctcgaaataaatcaaaacttagattctgtaggctgtgaaagcagaaaagtccttataaaaaaggagtaatgggataggatcatagctgtttggttttaagcagtttaatataatctgcaaatctaaataaataaagaatgcaaaaccatataatttgttgaataattttttataaatacacttaaattattacgaataaaatgttaaatacttttcttaataaattattttgaaaatttaagttacataattttaaagatttttattgaataaagttttgcggtttcacaaataatgtttacttttgcaatccaaaatgagatgtaatatatgttaataattccagtaaaagacggagagtctatcgacagagcattaaaaaaatataaaagaaaatttgataaaacgggtacagttcgtcagttaagagctagacaacagtttatcaagccttctgtaactttaagacaagctagattaaaggctgctcacaagcaaagaaatcttagcaaagaagaacaggcttaagaattttcttacacccatactaaattcactctttaaatgtttatatttgaagagtgaattttttgtttttatatactaaatgatgctggacaaattcctggaatatttacagttcgagaagagatattctcctcacaccattacaagctaccgaaaagatcttgaagatttttcccatttctgcctgaagacagaagcttcggaagatatttccaaagccgacaaaaaaataatcagaaattttatcgtagagctgagcgaaaatgatatttccaaacggagtatcaacagaaaattgtcttcgcttcgaagcttttacctttttcttttaaagattggtgaaataaaaatttctcccacagaaagtatttcttcattaaaattttatcccgaaaaacaaattcctatatcaaaagaagaaatgcaaacacttaatgatcaggtttttgaagaaattaacgatattctggataaatgtatcgttgaggtgctttatcagacaggaatccggaaagcagagctttgtggtatgacttttgaaaatgtaaaccttagcggaaacgaactgaaaataataggaaagggaaacaaagaaagatacatccccatctccggagaactttcggatctgcttaaaagttatttgaaaataaggaaaccactgcctgaacatgatttatatttttttgtcaataccaaaggcaaaaaactcactgaaaaatttgtttatgtggtcgttaataagtaccttagtcttgtaacaacaaaagaaaaaagaagtcctcacatccttcgtcacagctttgctacacacgttttggataatggggcagagatctctaaagtaaaaaaaatattaggacattcaagccttgcaagtacacaagtctacacgaatgctaatatagaacaattgaaaaaagtgtttaatcgggctcatccaagagcctcaaaaaatgacgaattatgaagatcacagtacaatcaattggtttaactccacacgaaccactagaatcacacattgaaaaaaaagtaagcaaactggatactttttatgacaaaattcaggagtgtaaaatatttttaaaagtagaaaacaactcggataaagcaaacaaaacggccgagattattctggcggttccgggagacgatattgtagtaaagaagacctctgcaagttttgaggaaagtttagacctatgcgttgatactgctaaaaagctattaatcaagaaaaaagaaatggcttagaaaaaaaagttaaaaaaagttattaaaaaatttgagaattcaaaaaatccgttctatatttgcactcgcaaaaagggaacagcgatcttttgaattcttttttaataatgcttccatagctcagttggccagagcacgtgatttgtaatctcggggtcgtgggttcgaatccctctggaagctcaattaatataaaatatctggggagattccagagtggctaaatgggactgactgtaactcagttgcttcggcttcgtaggttcgaatcctgctctccccacattttatattagaaaaaaagttgcataannnnnnnnnnnnnnnnnnnnnnnnnnnnnnnnnnnnnnnnnnnnnnnnnnnnnnnnnnnnnnnnnnnnnnnnnnnnnnnnnnnnnnnnnnnnnnnnnnnnatatcacactcttaaaaagcgtgattttttttactactgaaatgatgtagagtagagtttctcacagcgttcagtccatttattaaaatgcttccatagctcagttggccagagcacgtgatttgtaatctcggggtcgtgggttcgaatccctctggaagctcaatttaatataaaatatctggggagattccagagtggctaaatgggactgactgtaactcagttgcttcggcttcgtaggttcgaatcctgctctccccacattttatattagaaaaaaagttgcataaataaaggattttccttaagtttgcacagcgttaccaataattttggaaacaaaattgcggaagtagctcagttggtagagcgtcagccttccaagctgaatgtcgcgggttcgacccccgtcttccgctcaataaaaatcacgctttttggtgtgattttttagtttaggccgacttagctcagcggtagagtgcttccttggtaaggaagaggtcacgggttcaagtcccgtagttggctctcattttatcccgatttcttcgggatatttttatgcctgaattttgtctgaaattttaaaaattttcggaaaaattaaaaatagtgacatttagcttacaaattctgttaaacactctgcataaaaaagcaattcgaattcatttgatttttcaggataaaaattttcagaagcattcaatacaaatcttaaaattcaattaaaaataattcctccctcattcaattcctttacaatcatcaaaaatttcgttacattcgtataaaataattttcgatgaacattcttttattggaagacgatttaattctttcggcggaactttgcaaatttctggagtcaaataattttacctgcgataaaatctacgacggtgaaacatttcttcgccagatcaggaacagttcctacgatttatatcttctggacatcaatgttccgaaaattaacggactggacgtttgtcagaccatccgttctttcgataaaaatacgcccatcattattatttcggcttatggagatctttccgataagaaagatgcctttacacgtttggcggatgattatctggtaaaaccttttcagtttgaagaattattattgcgcatcaattctttgctgagaagaaaagcgccttctgagaacatggatcaggaaattataagaatcgatgatctgatagtaaataaaaccgaacagaaagtctatcgtggcggaaatgaaatcaatcttaccctgaaagaatttcagttgttggtttatcttgccgaagcgcagggaagaacggtttccaagcagcagatcacggaacacgtttgggaacataattttaatacgaacaccaataccgtggaagtctacatcaattttttacgaaagaagatcgataaagattttaaagtaaaattgatccacacccgttccggtttcggatattatttaagcccattatagaatgtctttaaaaaggaagatcgccctcaatctcagtattgccttttcattgctttttgctattgtaatggtagtcatttatatgtcttttaatgatttccgcagagaagaattcaaagaaagattcaggcagagactggagttcacttcccatttcattgccaagtctaaagattttgaagaagaagcaccggttttttttaatgaaaattcagataacattcttttaaatgagaccatattaattttcaacggaaaaaaagaattgatatacagcacgatcaaagaccgcaatgtaatctgggataatgaacttctgaaagaactcgacgaaaaaaaagtaatctactcagaaaaatcagttcccgaaatttatgcggcattaagaaccatcaacggcgaaaaatattatattttaacaagtgctttagattccaacggaaaatccaagctggaatatcttaaatatcttttaataactgcttatgtgatgagtgcccttctcattggctttttcagttattatttcatgggacagtttttaaaacctctcgaagatcttaatcaggaaatttctgaagttacggcacataaattaacaacacagattccggttcgtaattctaatgatgagattgatgttctggcaaaatcgtttaacacaatgattgggagactggacgacgttttccagtcgcagaaagattttaccgcaagtgcttcccacgaaatacggacacccatcaccagaatggcttttcagcttgaaaatttaataaaattcggagaacattctcctgaaaccctatcatctttaagacagattcaaagggatgtgtatcagctttcggatcttaccaattcacttttgctgcttaccaaattcgacagggaaaatatccagagcatttacgaagaagtgagaattgatgaagtcatttttgaatcctttgaagcggttgaaaaaagctaccccaaattaaaactggattttctgatttccgaagatacttctgaagatgcacttttaaccattaaaggaatccagtctttactcgatattgttttcatcaacttatttaaaaatgcagccatctattccgatgatgtggaagtggatgtactgattaaagaaaatgacgaacatctgattgttgacgtcatttcccatggaaacaccattccgaaagaagaacaggcaaaactttttgaagcctttaaaagaggaaaaaattctcagaatatttcaggttccggattgggtttaagaattgttaaacgaattctcgaatatcacggcgcacaaattatttatacttcaccggcagatctccttaataagttcagtgtgatttttgtgaaataactttttaagttaatctaaaaatatttatgtaattcagcctttgcaaacgaaaatattcccaaaattaacgtttacatgaattgaattaatactataatcaactcgtaacttaatttaaatgagatgattatatgttattgcttaacaaatttaatttttttttaagcattctttaagagcattttaatagcagaaaggcatttttgtatcataaaatcaataaaatgaacaaatttgcagggctgttcatcgtcatttcctcattcatgacggcacaacagcaaatgtcgcttcgggattgcgaagaagctttccagaagaacaatttacaactgctcgccgaacagtacaacatcaacatggctgatgcagatattttgcaggctaaaatctgggaacttccgcagttgagcggacaaatcaatgcttacaaccccgaagacagaaaagttttcgatgtgggacatgcaaaaggagcgcaggtaacccagttaatttacatggggggcaaaaaaaagaatgaaattgccttcgcaaaatccaataaggaactcgcgcaacttcagtttgcccagcttttggtagatctcaaatcccagcttcgttccacttactttgaactttactacgaaaaactaaaactcgacaataccaataagcaattgggttacatgaacgatcttctggctgcctacaaaatacagtctgccaaaggaaatgtttcgctgaaagacgaagttagactgcaaagtgttgtaattcagttaaataacgataaagtaggaatcaataaaaatattcttgaatttgaacagactctgaaacttcttacaggagtcaccgaagaaatagaaccacagctttccgattctgaagcgaaagaaattcttgccgctcagcctttcggcgatgaagcggaacttcagaaaaaagcactcgaaaacaatgccgattatcagtacaatttaaaattaatcgacaacagtaaattatatgcgcaatggcagaaatctttaaacgttcccgatctcaatctcggtgcagggtgggaccagaatggcggaaccttcaaaaatgaagtcaatctgatggtcggaattcctcttccgctttggaaatccaataaaggaaatgtggataaagccaattttgccattcagcagaaccagaaaaatgcagaatttcagaaactgaatctcgaaacaaaagtacagtcgtcttacaaaatatggaaaacacaatacgatcagctcagccagattaaatctaccgatcttaataatatagaactggtctataacgggatgctgaataatttcaggaaaggcaacatcagtcttattgaatttacagactttatggacagttaccgcgaaacggcacttcagatttatgatatgaaaaacgggatcatgcagtctgcagaacaattgaatcaactagtacaaacgaaaatcttctattaaacatgaaaaattatataattccggtaatgattgccctgtctgttttatcttgctccaaaaaagaggaagaaacaaaaccgcaggcaaaaaaaggttttgaactgagcaacacgatgctgaattcaatcgatttagcaaaagttgaaaaaaaatatatagaagacgattacaatttctacggaaagatttcagcagacaaaaacagctacatcgatgtctatcctttggtcggcggaaatgttttaagcgttaatgttgaactgggcgatcatgtaacgaaagggcaggttctcgccaccatacgaagtacagaattggcggaagtgcagaaagatgtgagtgatgcaaaaacagatttagtcgttgcccagaacaatcttcgcgttgccaaagaaatgtatgaaggaaaactgaataccgaaagagacgttctggaagccaaaagccagcttcagaaagcacaggatcagttgcagcgggcaagtgcagtgagtacagtgtataatgtaaaaaaaggaaatatttacagtgtggttgcgccaatcagcggatatattgttcagaagaacatcaataaagatatgcagctcagaagcgaccgaagcgataatatttttgatgttgccaataccaccaacgtttgggcaatcatgaacgtaaatgaatctgatattgataaaatcagtctcggaatgaaagcacaggtttccacattatcgtatcctgataaggtttttgatgggaaaattgataaaatttttaaaattattgatcctcaaaccaatgcgatgcaggcgagagtagtgcttgataatcagaatggattattgattccggaaagtaaagcaacgataaaagtaacaagttcggagaataaaaccgcacttacagttccttccaaaaccgtgatttttgatgataacagaagttttgtagtaatttataaatccagaaccgatgtaaaagtgaaagaaataaaagttctgaaacaggtaggagacattacctacgtttccgaagggttatccgaaggagaacaggtaatcacaaacaatcagttgttgatttatcgctctttgaatagctgattttatttaaaacattaagattttaattaagaagttacgttgaattaagaaatatctgaagatattttagacatcggtttttaaaattgtttacaagtcacttaataattcttaactccttacatatccttaatggttaaaatcaaaagatcttcgctgagtgaatagtttatgctgagcttgtcgaagcacctttgcaaacgtaaaaaaacatatggtttgtcaaaaagcttcgcgctccttgcgttaaaaacaaaagaaaacaaattcaacgacttttttaggtcaaaaaaaatccatcatgaacaaattcattaaaaatatcattgctttttcgttaaaaaataaagcattcacctttatttgggtagcgattttggcagtttcgggattcataagtttcaaaaatatgcctattgaagcctttcccgatgttaccaatacccagattgtcatcattacccagtggaacgggagaagtgccgaagaagtagaacgtttcgttaccacacctattgaactcgcaatgagtccggttcagaagaaaaccagtgtaagaagtaccacgatgttcggactttccatagttaagattctttttgatgatggagtagacgatatttttgccagaaatcaggtgaataatcagcttcggaccgtgagtcttcccgatgaagtggatcccgaagtacagccgccttacggaccgaccggagaaattttcagatacactttacaaagcaaaaccaaagattccagagaactgttaaccttacaaaactgggtgatcgaccgtgctttgagaggagttcccggtgttgcagacatcaacgttttcggaggtcaggacaaagtgttcgaattaagcatcgatccgagagcattagataaatacaatttaacgccgcttcaggtatatgatgccgtcacaaaaagtaatttgaatgtcggcggtgatgttattgagaaaaacggacaggcttatgtggttcgtggaatcggtctggtgaaatctgtcgccgatatcggaaatattaccatccagaacgacagcggaaatcctgttctcgttaaaaatgttgcagaagtacacgaaagctcgatgccgagagtaggacaggcgggactcaatcatcaggaagatactgttgaaggaattgtcgtgatgcggaaaggagaaaatccgcgtgaagttttggtcggcgtaaaagcaaaaattaaagaactcaacgaaaaagtgctgccgaaggatgtaaaaatggtcactttttacgatcgtgataatctcatggatttcaccacgcacaccgtaatgcacaaccttattgaaggaattgttctcgttaccgtgattgttttgattttcatggcagattggagaacaacgcttattgtttccataatcattcccttatccttattatttgcatttttatgtctgaaactcgcgggaatgagcgcaaatttactttcactcggcgcggtagatttcggaattatcatcgacggagcggtcgtcatggtggagggactttttgtgatgctcgaccataaagcccacaaatacggtgatgaaaaattcaataaactggcaaaagcaggctggatcaagcagacgggaacaggtcttggaaaagcaatcttcttttcaaaactcatcattattacttccctgatcccgattttctcattccagaaagtggaaggaaaaatgttttcgccattggcatttacattaggttttgctttaatgggcgctttaattttcactttaacgctcgttccggtgctttcgcacatccttttaaataaaaatgtaaaggaaaaaaataatccgttcgtgaatttctgggacagaattgtgttgaaaggattcaattttacttttaaacataaaaagctcagcttaattgtttctctgtcatttttagccgtgactttattttcagggaaatttttaggaaccgaatttttaccgcagctaaacgaaggctcattgtggattaccgccgaaatgccgatgagttcatcattaaaagaatctttaaatacagcagatcttcttaaaaaagacatcatgagttttccggaagtcacggatgttctcgcacagacgggaagaagtaatgacggaaccgacccgaatggttttggttttgtgcagtttgccgtgaatcttaaacccaaagaagaatggaaacggaacatcacctatgaagaactgattgaagaaatcgataaaaaattaagaaattatcagggaattacattcaattattcccagccgatttcagacaatgtggctgaagcagttgccggtttcaaggcagaaaacggaattaaaatctacggagacaaccttcagactttggatgtgcttgccgaaaaagttttaaaagaggtaaaagatattaaaggcgtaaaagatgccggaattattaaaaatatcggtcagccggaagtaagcgtggttctcgacagagataaaatggcggcttacggagtaatgcccgatgatgcgcagtcggttctggagatggctttcggaggtaagaccgcttcggaaatgtttgatggcgaaagaaaattcccgattcgtctccgttattcgcaggagtacaggaaggatgaaaatgatattgcagcattgatggttcctacacaggacggtgctaaaattccattaaaagaaatcagcactattgaaaaagacaacggagctgcatttatttacagagatgatattaaaagatacatcgggattaaattttccatccgcgaccgtgatttgggaagtacgattgccgatgcgcagaaagcggttgctaaaattgatcttccggacggatattctgtaggatggaccggtcagtttgaaaatcagcagagagcttcaaaacgattggcgcaggttgttcccatcagtattttaggaattttctttcttttatttatccttttcggaaatatgaaagattctttactggttttggcaaatgttccttttgctttaatcggcggaattatcgcactgcacattaccggaattaattttggaatttcagccggagtcggaatgattgcccttttgggaatctgtattcagaacggagtcatcctcattacagaatttcatcagaatgttaaaaacggaatggatctggacagctcactgctgaatggggtgaaatccagaacacgtcctgtgattatgacggctttaatggcatccatcggattaatgcctgctgctttatccacaggaatcggatcagaatcccaaaaacctttggcaatcgtcattatcggcggattaataacggcaactgttttaaccctgctgattttcccgattattttctggattttcaaccgaactaaaaaatctcaacagatctgatcatttctttcaattatattttaaactcattttaaatttaaccgcaaaagagacaaaagactttattggatttatttaaagtatttcaaaagcctgcaaagagaaaaaatctttgatttttttaacttatgtgctcttttttccatttaagaagtaaacttaaacaactaaagggttacaatcttttgcatcttttgcggtaaaaaaatttagacaagttttactttaaccttttatttaaccacaggttgcaaaagatatttaaataagataactaaaactttaaagaaagagtttatgttttcttttctttaccttaataataaactatcaatatattttcgaaatcttttgcctttgcggctaataaacatttggttaaaaaagaatcgcggaaaacaaagttttccgcgattctcgctattgaaataattattatgagtttagaatcctaatcctacagcaaaacctctaactgtatttgggaaatctgaaactgcagttgcagctcctgttgaagtattaatgctgtatacttttgtggcagttcccactgttgccagtaaatacgctttttggctcatgcttccgatatcgaaaccgttcgcactggtaatattgattcctaaagaacctgtctctaccagagttccgttgtttggtggattttgttgataaagtttgtctgtattatgatcgataacgaacaaagttgttgaagtagctcctgcgaaattattggtataagcagccgctccgatcatcggagttcccggattcagcattccgtctgctgccgttattccgcctgttacaggatcaagacgaagattttgtcccgtgttgcttacgactctgatcttatcaacggtcggattaaaatcaaacccgaaatctgttcccgcaagtaacgttgcaaaaggagaagttcccactgcggttgcagctcctgttcctaaattaatagtataaagtctgcttgaacttcccaaagcataaagctgtccgttcaaaggtctgaaatctattcctaaaatactttcaccactctgaagtcctgtaattccctttgaaaccggcatcggactgttcggattgaaaatctgaaggttgtttgaattatctactgcgtaagcaaccggctctgtaggaatcgcaagatcaataatctgttgctgaagcatcccgatgttggttgctttacctgtactcagatccaataaatgcaggttgctgtttaaagctaataatgctacaccgttatcatatttaatatcaaaagcagcctgtcctgtaaaagtagttcccaaacttcctacttctaccagtgttccgttgttcggaggatcctgcttaaataactttccggaagtcatatcaatatcatacagaaccgtgcttgtagctccggatttgctgttggtataagccacccctgttacagcaggagttccgcctccgttaatgttcatatcggttgcagcaaccgctcctgtttccggatgaagtcttaaattctgccctgtattgcttactaaacgaattctgtctacggtaggattaaaatcaattgacgcaattgttcctgaaacagccggtgaaaatgctgttgtgcttaccgctcttgcggaagcgttggaagtgttgatgatgtaaagcttacttgcactggataaagcgtaaagctctcctgttgcaggtctgaaatcgatactcatcagtttttcgcctgaaactactcctgtaacagcggttttagaagtaaacattttgggattgttggcattgaaggcaacaagttcgttgttcgccgtaagtccgtaagccataagatcgggtccctgaacaggcatattcatgtctgtggacatcatatcatcggaatcatcacatgaaaataagatgatggtgctgaacagtacggtacataaatgtaataattttctcataatatattattttaatggttcatatttccatctacgataaaagatatattatggttttgcattactgcattttttctcaatattatttttttcatctattttattgcattcataattaaagagatagtttatattttggctaaaaggtttattccggattttctaaattgagaaatttgtgtaaatttgcaatctcaatacattgaaatataaggtttgtacttcattggatttgaatattgaaactttttttaataaaaaggttttggtatttaaaaattcattatatttgcacaccgaaaatttgaaaaacaataaataaataattttaaatcatggcaaaggaaacgtttaatcgtaacaaaccacacttgaacattggtactattggtcacgttgaccatggtaaaactactcttacagctgctatttctgctgtattagctagcaaaggtcttgctgagaaaaaagacttctctgcaattgactctgctccagaagaaaaagaaagaggtattactatcaatacagctcacatcgaatacgaaactgagaaaagacactatgctcacgttgactgcccaggtcacgcggattatgtaaagaacatggtaactggtgctgctcagatggatggagctatcgtggtatgtgctgcgactgacggaccaatgcctcaaacaagagaacacattctactttgccgtcaggtaaatgtaccaagaatcgttgttttcatgaataaagttgacatggtagatgatgctgagttgttagagcttgttgaaatggagcttagagacttattatctacttatgaattcgacggagataactctccagtaatccaaggttctgcattaggagctcttactgctgctactgaaggtaactctgatgacaagtggttcaaaactgttgagcagttaatggatgctgttgacgagtggatcgaagagccaacaagagatacagataagccattcttgatgccaatcgaagacgtattctctattacaggtagaggtactgtagcaactggtagaatcgaggctggtatcatcaacactggtgatcctgtagatatcgtaggtatgggtgatgaaaaattaacttctacaattacaggagttgagatgttcagaaaaatcctagacagaggtgaagctggtgataacgtaggtctattgttgagaggtattgaaaaaactgacatcaagagaggtatggttatcgctaagaaagactctgtgaagccacacaaaaaattcaaagcatctgtttatatcctttctaaagaagaaggtggacgtcacactccattccacaacaaataccgtcctcagttctacgtaagaactactgacgttacaggtgagatcttcttaccagaaggtgtagaaatggtaatgcctggtgataacttagagatcactgtagaattgttacaaccaatcgctcttaacgagggtcttagattcgcgatcagagaaggaggtagaacagttggttcaggtcaggtaactgaaatcttagactaatcatctaacacaatataaaagcttccgtaaggaacttctttactgaagctttttttaactacgggcatcgtccaatggtaggataccggtctccaaaaccgttgatcagggttcgaatccttgtgcccgtgcaaataacaattatgagttcatttgtcgattttttaaaaggttcttataacgaattcagacataaagttgaatggccaaagtggtctgatctgcaatcgtctacaattgtagtaactgttgcaacagtgatcttggcgttatttacttttggagttgatgaattgttttctaaagcaatcagcaacatcattggaatgctaatcaacttgttcaattaataataaaagtattttcccaataatgagcgaattgaaatggtatgtgctgaaagcgatcagcggacaggaaaataaagtgaaaaactacgttgagacggaaatcaagcgtttagggtttgagcagtacgttactcaggtagttattcctatggaaaaggttattcagatcagaaacggtaaaaaagttcctaaagaaagaccttactatcctggatacttaatgattgaagctgatttgatgggagagattcctcacgttatcaaaaacattccgggagttatttctttcttaagcttaacaaaaggaggagatcctgttccgatgagaaagtctgaggtaaacagaatgttgggaagaatggatgaactttctgagtttgcaagcgatgttgaaatcccttatgtagtgggtgaaaacgttaaggtaatagacggtccattcaacggattcaacggaactgttgaaaaaattcttgaagataaaaagaaaattgaagtttctgtacttatcttcggtagaaaaactccaatggagcttagctatatgcaggtagaaaaagtgtaaaaactttaaaaaaataatttaaaaagactgttcgaaagaatggtctttttcttttttaatatatttgatgatgattcgaactatttcattatatgtattcttaacattccttcttttgtctgcaataaactgtaaaaaagaaacttcttcgccgccatcggtcaattctccgtcacctcaaaagcaaaatgttttaatagccgtagatacaactttaacttcgggaattgtagataatcttttaaaacctgtctatgatacgatgaatatgaaacctttagaagaaatggatgaggaaatacagctttcaagatcagatatcaaacgttttgtaataggaaaagaaaaatttgctgctttagtagtagaaaatcaatatccttttgcaggcgcatccacagggcattgcgatctgttcatattccgattcaatggtaagaattgggaaactgctgattttatgatcgaagcaggaagtggttgaatgtatgggaattccggttcgttgcatagctttactatgattggtaaagaggctgcatgctttgctttatcaggcggacaaactcatatgggaactttattttatgatgatttggttattttcagccagaataaattaaaaaaggcttgcactgttactacagaatattcttacggagattgggatgataattcagatggaaccaaattttgttataatgttcagtatgcgtttcttccatcagagaaggcggtgtacgatttacaacttgttaagaagagttgtttaaaagaagataaggatcaaattctggataaaattgttgtaccattcgataatagagaaggtgtatttaaaattccacaatcttttgatgatagtttgccttaatttatttaaaaatcaacatattccgtttgctatttcaaaaatatttcataattttgcagtccgaaaagtaggattgtctaatgtgagaatggataacctgctgaataataaatgcttccaaactcattaattattcaaatttaaaaaacaaacaatggctaaaaaagtctttaaaatggtaaagcttcaggtgaaaggtggcgcagctaacccttctccaccagtaggtccagctttgggttctgcaggtgtgaacatcatggagttttgtaagcaatttaacggaagaactcaagataagccgggacaagttttacctgtagttattacagtatacgaagacaaatcttttgaattcgtaatcaaaactcctcctgcagcgatccagttaatggatgcggctaagatcaagggtggttccggagaaccgaacagaaacaaagtaggtgctgtaacttgggctcaggttcaaaagattgctgaagataaaatggcagaccttaactgctttacaatggattcagctgtttctatggttgcaggtactgcaagatctatgggattaagagtaacaggaactaaaccaacttttaacgcttaaaacttaaagaaatggcaaaattaactaagaagcaaaaagaagctttaagcaaagtagaaaaaggaagaatctataaccttgaagaaggtgcagctcttgtaaaagaagtaaatactgcaaagtttgatgcttctgtagatatcgctgtaagattaggggtagatccaagaaaagcaaaccaaatggtaagaggtgttgtatctcttcctcacggaactggtaaagatgttaaagttttggctttagtaactccagataaagaagcagaagcaaaagaagcgggtgctgattatgtaggtcttgatgaatatttacaaaaaatcaaagaaggttggacagacgttgacgttatcgttacgatgccggctgtaatgggtaaattaggaccattgggtagagtattaggaccaagaggtttaatgccaaaccctaaatcaggtactgtaactatggaaattggtaaagcagtaactgaagtgaaagctggtaaaattgatttcaaagttgataaatatggtattatccacgctggtattggtaaagtatctttcgatgctgctaaaatcaaggaaaatgctcaggaattgatctctactttgatcaaaatgaagccaactgctgctaaaggaacttatgtgaagtctatctatctttcttctacaatgagtcctggtattgcaatcgatactaaatctgttaactaattataaatcctaagacaatgacaaaagaccaaaaagttgtagcaatacaagagatcaaagatttgcttcaggatgcaaaagtagtttacgtagcagatctagaaggtttgaacgctggaaaatcttctgacttcagaagacaggctttcaagcaaaatatcaaagtaaaagttgtaaaaaatacacttttgcaaaaagcaatggagcagattgaaggagtagattactctgagatgttccagtctttcaaaggaaattctgcaattatgattgctgagaccgcaagtgctccagcaaaattaatcagagatttcagaaagaaagaagaaaagccggcgttaaagtctgctttcgttcaggaaactttctatgtaggtgacaataacctagagatgttagctaacatcaagtctagagaagaaatgatcggtgaaatcatcggattacttcagtctccaatccagagagttgtttctgctcttcaaaacaaacctgagacagtagaagctaaagctgaagaagctgcacctgcagtagaagaagctgctgctactgaaactccggaaactccggctgctgaaggagaagctccagctgctgaataatttacactcaaaaaataatcaataatcaacaaaaacattacaacaatgtcagatttaaaaaatttagctgaaacgctagtaaacttaacagtaaaagacgtaaacgaattagctgctatccttaaggatgagtacggaattgagcctgctgctgctgcagtagtaatggctggtcctgctggtgaagctgctgaagaaaagactgaattcgacgtaattcttaagtctgcaggtgcttctaaattagcgatcgttaaattagtaaaagatttaactggtgctggtcttaaagaagctaaagatatcgtagacggtgctcctgctccattgaagcaaggtgtatctaaagacgaagctgaagctcttaagaagcaattagaagaagctggtgctgaagtagaattgaaataattctagtttacattaaaaataggaagcctgaacattttgttcaggctttttttattgggtgtaaaaattcattttaatatctataaatatttatgaactaaaaaaaagcaattgtaattttttatttttaaattatttttaatttttgccttttttgtttatttattatgtgttaaattgcttagtagtttaaattatttaataaaaatttataatttaattgaaaatatactatatttgtatccgtaaaacacacagccttggatataaattattttctgtcggacattaatgtgccgcttattctttacatgatcttgttgatatattttaatacagcaaagctgttaaattcctttctttatcaacagatatcatctaaaaattcttacttataaaattacatcactgctaattttatcacacattgtaaaattatctttacagcaggcatgaaataacttttcatgtaatctttcaaaaactacaaatatcatataatgaaaaacaaattattcggattatccgtgttgacaattttcagttgcatgctaaacgcacaagtaggcattaatactaatttgggacaggcaactctcgatgttgtgggagcgccctcaaatccaaataaacttgatggaattattgcaccgcgaattacaggagaccaacttaagggaaaaaactattctacagctcagactggtgcaattgtttatgtaacaactgctgatacagcaccttcaggtcagaccgccaatgttacaagcgcaggatattattattttgatggctcagtttggattcagtttcttcagccacagtcttcagattggaaaacaaccggaaactcaggaactacggcttctgcgtcaactttagggactgctgtttcttccggaaactttttaggaactaccgacagtcagaatttagtatttacaacaaacaataccgtaaaagcaattttggatgttaatggtaatcttagaggtggaaatgccaatacttcagctccttatgcatcactttcttggggatcaaacaatacattatcaaacaatacctcgtccaacatcgctttaggaagagaaaataccgttgctgcgcaggctgccaactttccgggtgtggcaataggagcagcaaacagttctttaagcggagcaaaaacaatagggaacaacaattttgccacaggagccaataccattgttttaggaaataataacggaacttccgcagctaacgtcagcggaattaatgttggaaactccaatgtaaattccggtggttttgcttttggaacaggaaataacgtaacgagcaataattatgcatttggaaatgccaatgttgcaagcggagcagccggcgcaattgctttcggaaccaatgcaagtgcaaccattgccaatcagactgtttatgccaatacctcacatgcattttccggacagggtgtaattggaacagcaattacggacgttggtgtaaatatgactcccaacggaactaatattccggatcttgaaatcagtaaagggattttaattaaagccaccggtgttcctgtaacttcagactgtaacgcaagtaatgaaggaactattgtttatggtaaatccggaaatacaggaagcttttacggatgcagaatttccgcaggagtatatgcgtggcaacaattctaaaaaatacacaaactttaaaatctataaaaatgacaaaaaaattatttacgaaaattacagcatttctcatgctgtttctactgtctgtaaagattttcggacagggttacacaccgattcgaggaatgggagtggaagcaaaaccacttaacgcaaacggaatatgcctggcttgttacagcggaagcacaaatccccttattgatgccaatttggataacagcgtaagtatgggaagctttaccaccttggtaagcggaaacggagtttctgttaaaaatacaaataccacttatcctgcaggatatattactggttttaatgtagatttaggaaccagcgtttttacggcaagtcttttaagcaatttaagaatcagcacctataaagcaggagttcttcaggaatcttcaaatagtgcaactttactgtctgttcctgcatttggaggaaccaaaacaagaattttccttcactttaaaacaactaaagattttaacgaagtaagactgtatcaggttaacgccctttctatattcagtgccctgaatatttattatgcatttgcttttgatcccaataaagttcctgtagataataatggcatctgtgatgatattattgcaggaagcggtgtagatggaaatgtttcaggaagcagcagctttttagcacctctttctttcgtggtcgacaggcaaaagattggcgacggagataaaagttcttacggttctgttgttttaccggcaggcttgttgggatcatactctgtaggcgtattagataagaatcaggtttatcccgcaggaaataaagcaggttttgttattgaaccggacgatcagggtaaattgctaagtgctgaatttttgaaaaatataacaattgaaacctatttattcgggcagttacaggattctaaaaacttatttgatggaggcgggctgattaatatcaaagtgttaagattcggttccaacaaacaaaaaatttccctcaatacaaccaagccttttaatgaggtaagattaaaaattacgcagacagtaggtgtgaatttcggagctttaaaagtattttatgccttcgaagaacctcaggattgcgactgtaatgagtatattcagacttcgggaacttcaagattaggagatattgtacagggtgcttcatggacaggtgcttccggaacaattttaggattaaccaatattaccaacacgggaaacgttgtagataccaacacagcaaattttgcaacagtaaatttttctccaatcaatttattaattccaacagttaggttaaccgttaaaagcaatacaggagaatatcctgccggaactttcggcggatttaccttaacgaaaagtgctaatttgttaactataaatgctctagattatattaccgttactttttataaaggaacaacggttacagaattcagaacttcgggaggtttattcagcggacagtttattacttcggcttccaatcagttttatgttggttttacagcaacaaaagcgttcgacagaatgaaaattgaaatcaatcccggaataggaatcactttggcgcagcaatactacatttataatgcatttgttcagcttgatgacgatcaggatggtgttccgaactgtaacgataaatgtccgaacggaaacgacagtattgataacaacggaaacggtattccggattgtgctgaaggatgttctgtggtaaatgataaatcttctgcgttagacagcgatggagatggtgttgcagatgcttgtgataatgattctgataacgacggcattccggatgcatgggaagaccttaatggaaacggaaaatttgatgatgatgatgtagacggaaacaaactggttattgcagaactgggagacggaatttcaagttatcttgatcttgattctgataacgacggtattttagatttatttgaatctggaattccaacttcagttatcgatcagattgatgcggatcataacggaattatcgacagcggcgttgcggtaggaaataacggaattgcagatattctggaaacatctccggattcaggcgttatgaaatatcctttaaaaaatacggatggagacgataaaccggattttgtagatctgaaatccaataatatagacttcgatctttataccatcggaaaagataatctggatgatcttggagaaggatttatttcgagaataaacgatgcggatgcagatggaattcaggcggttgtagatacagatcttattgcgaaaggttctccggattcccctctttcaccatattcttcatttgcgaaaaacagtgcaattgcagctaaagcttctatgggagaagtaaagacagtagcaaatgatgttaaaatttatcctaatcctgtaaaagcaggggaagatttaaatgtaaaatctgatgaagaaggtacatacacattgttttcagctcagggacaattaatccgctcaggtaaattttcaggaaataccgaaattgctacttcttctttaccggcaggaatgtacattataaaagtagaaacaaaaacgactgtaaaatcatacaaagtcatcgtgaggtaatttcaataaataaatcgtttctacacacataagtcattcgcaagaatggcttatttttttaaatatctgaaattaaatgttttattgatttttttttaattaactttataaaaaaagtaattaccgtaaacaaatagtaattattcttagtttcttggagtaaatatatattatgacggctttttcgaatattgatcatctgctaatctttttcgataaaatcggtcgtacatcaaaatacagctaaatcttaggttattataatgattttaagattgagtttttttattaagggtaggtcatccatatttttggatgacctttttgtataaaaataaaatattactgtcccaaaattttccatcattaaaaaattttgagtttttgctgaatgaataaggtgtacagattagaaaacagttgatatttaaaaagaatcttagcgatctcctgctttaaagaacagtataattaataatgaaatcgaaattttaaaaccacaacgataaggcaatagggaaatcataaaaacaattaacatcttcagaatgaagttgttttatttgtatatgaaaataaaatgttgtaaatttgcagtctcttttggcgcgaataattgtttgtaaatctataaaatattgaatgtcacctctttcatttccatgaaagagatttcgtgtgtatagatattacggcggtatctgcctcaaaagtaataaaaatattttgcattacgctgtgaaaagatataccagtgttgcagttaggaataagattctgagaatcaaaatgaaaaaataaaagactgtctcttaatagcgccaatattataaggtcttttacaatttctgctctcaaactcttctttctgatattttttaatgaatcaaaatattttttaacctttcttaaaagttttatgagtaaaacaacacctacaactaggggaaatcagagagtaaatttctcttcagcgaaaggaaaaatcatcactccggacttcctggatatccagatcgagtctttcagtgagttttttcagcttgatacgcttcctgaagacaggagagacgaaggattgtacaaaacattccaggaaaatttcccgattaccgattccagaaaccaattcgtattggaatttttggattatctggtagattctccacgttattcaatcgatgagtgtgtggaaagaggtttaacgtattccgttcctcttaaagcaagacttaaattgtattgtacagaccctgaacacgaggatttccagactgtggttcaggatgtatacttaggtccggttccttacatgacgccgtccggttcattcattatcaatggagcagagcgtgtaatcgtaactcagttacacagatctccgggtgtattcttcggacagacttaccacgcaaacggaactaaactttattattcaagaattatccctttcaaaggatcttggatggaatttacaacagatatcaacagcgtaatgtacgcgtatatcgaccgtaagaaaaaattaccattaacaactttattaagagcgatcgggtatgaatctgataaggacatccttcagatcttcgatcttgctgaagaagtgaaagtttctaaagctgcccttaaaaaagtagaaggaagaacattggctgcgagagtattgaacacttggttcgaagatttcgtagacgaagataccggtgaagttgtttctatcgaaagaaacgaaatcattttagacagagaaacgattcttgaaaaagaacatttagatcttattcttgatgcaggtgtgaaatcaatcctgattcacaaagaaaacagcaacgagttctctatcatccagaatacattacagaaagaccctacaaactctgaaaaagaagcagtagagtacatctatcgtcagttaagaaacgcagatccgccagatgaggaaacagcaagaggaatcattgaaaaattattcttctcagagcaaagatattcattaggtgaagtaggacgttacagactaaacaaaaaattaggtcttaacattcctacaacaactgaggttcttacaaaagaagatatcattgcgatcgtaagacacttgatcgaattggtaaactctaaagcggaggtggatgatatcgaccacttatcaaacagaagaattaaaactgttggtgagcaattagcaggacagttcggggtaggtctttcaagaattgcaagaacaatcaaggaaagaatgaacgttagagataacgaaatctttactccgcttgatcttgttaacgcgaaaacgttaacatcagtaatcaactcgttctttggtaccaaccagctttctcagttcatggaccagaccaacccgctatcagaaatcacgcacaagcgtagactttctgcattgggacctggaggtttatcaagagaaagagcaggtttcgaggttcgagacgttcaccatacccactacggaagaatttgcccgattgaaactccggaaggaccaaacatcggtttgatttcatctttaggtatttatgcgaaaatcaacagattaggtttcatcgaaactccgtacagaaaagtagaaaatggtaaaatcgagcttaatgcagatcctatctacttaaatgcagaagacgaagaatctaaagtaattgctcaggcaaacgttgaactaagcgacaacggtgaattcgaaacagacagaattattgcaagattagatggtgactatccggtagttgagccaaaccaagtagaccttatcgacgttgcaccaaaccagatttctggtatctcagcttcattaattcctttcttggagcatgatgatgcgaaccgtgcgttgatgggatcgaacatgatgcgtcaggcagttcctctattgaagccacaggctccgattgtaggtacagggcttgagcagcaggttgcaagagattcaagaatcttaattaacgctgaaggtacaggtactgtagagtatgtagatgccgacagaatcgttattaaatatgaaagaagcgaagacgaagatttagtacaattcgagtctgctactaaaacatataacttaactaagttcagaaaaaccaaccagagtactaccattaccctaagaccaaatgtaagagtaggtgatgtagtggaaaaaggacaggtactttgcgacggttatgctactgaaaaaggagaattggctcttggtagaaacttagtggttgcattcatgccttggaaaggatacaacttcgaggatgcgatcgtaatcaacgaaaaagtagttcgtgaagactggtttacttcaattcacgtagatgaatattctcttgaggttcgtgataccaaattaggtatggaagaattgacagcagatattccgaacgtttctgaagaagctactaaagatcttgacgaaaacggtatgatcagaatcggtgctgaagtgaagcctggagacatcatgattggtaaaattactccaaaaggtgaatctgacccgactcctgaagaaaaacttcttagagcaatcttcggtgacaaagctggtgatgtaaaagatgcttcattaaaagcagattcttcattaagaggtgttgtgatcgacaagaaattgttctctagaaacattaaagataaaaagaaaagaactgaagaaaaacttaagcttgaagaaattgaaaacacttacaaggctaagtttgatgatttgagaaatactttaattgaaaaattaaatacccttgtaagcggtaaaacttctcagggcgtgaaaaacgaccttgatgaagaaatcatcggtaaaggggtgaagttcactcacaaattattgacttcagttgaagattatgtaaacgttagcggttcagactggacagttgataacgataaaaacgaattaatcaaacagttaattcacaactacaaaatcaagtacaacgatattcaaggggttaaaaaccgtgagaaattcgcaatttcaatcggagacgaattacctgcaggtatcatgaagttggctaaagtgtacatcgctaagaaacgtaaactgaatgtaggagataaaatggcgggtcgtcacggtaacaaaggtatcgtttcgagaatcgttcgtgaagaagatatgccattccttgaagacggaacaccggtagatatcgtattgaatccacttggggtaccttcgcgtatgaacatcggtcagatctacgaaacagttcttggatgggctggtcagaaattaggattgaagttcgctacgccaatcttcgacggagctagcttagaccagattactgaatatactgagaaagcgggtcttcctaaattcggtcacactcacctttatgatgggggtaccggagaaagatttactcaggctgcaacagtaggggtaatctatatgttgaaacttgggcacatggttgatgataaaatgcacgcacgttctatcggtccttactcattgattactcagcagccgttaggaggtaaagctcagttcggaggtcagagattcggagagatggaggtttgggcacttgaagcattcggtgcatcaaatatcctgagagagatccttaccgtgaagtcggatgacgttattggtagagcgaaaacttacgaagctattgcaaaaggtgaatcaatgcctgaaccaggtattccggaatcattcaatgtactacttcacgagttacaaggtcttggattagacgtaagactagaggaataattttaaattttaaattataaatgctgaatggaaacattcggaaattaatctaaaatctaaaatctaaaatttaaaatctaacaaatgtcaaataaaaataaatcaagtagatttaataaaataaccatcggtttagcttcaccggaatcgattcttcaggaatcgagaggggaggttcttaaaccggaaaccattaactacagaacgcataagcctgaaagagacggtttgttctgtgaaaaaatcttcggtcctgtaaaggattacgaatgtgcttgtggtaaatacaagagaattcgttacaaagggatcgtttgtgaccgttgtggagtagaagttacggagaaaaaagtacgtagagagagaatcgggcatatcaatctggtagttccaattgcgcacatctggtatttccgttctttaccgaacaaaatcggttaccttttaggaattccttccaagaaattggatatgatcatctactacgaaagatatgtagtgattcagcagggtattgctaaaaaattagacggttctgatttcgaaaatatggagtttttaactgaagaagagtaccttgatatcatggaaactcttccgattgagaaccagtatcttgatgattccgatccgaacaaattcatcgctaagatgggtgctgaagctgttgaagaattattaaaaagaatcgaccttgatgcattgtctttcgacctgagacacaaagcacacaacgaaggttcaaaacaaagaagaacggaagctctgaaaagattgaacgttgtagaagcattgagaggtgctaatacaagaatgatcaacagaccggagtggatgatcatgcgtgtacttcctgttattccaccagaactaagaccattggttccgttggatggaggacgtttcgcaacttccgatttaaatgacctttacagaagagtaatcatcagaaacaaccgtttgaagagactattggagatcaaagctccggaagtaatcttgagaaacgagaagcgtatgcttcaggaatctgtagattcactattcgataatacaagaaaatcttcagccgtaaaatctgaatcaaacagaccgttgaaatcactttcagattcattgaaagggaagcaggggcgtttccgtcagaacttattaggaaaaagggtagattactctgcgcgttccgtaattgttgtaggtccgaacttacagcttcacgagtgtggtattcctaaagatatggctgcggaattgtacaaaccgttcatcatcagaaaactgattgaaagaggaattgtaaaaacagtaaaatctgctaagagaatcatcgacagaaaagagccggtagtgtatgatatccttgaaaacgtgatgaaaggtcaccctgttctactgaacagagcacctacgcttcacagattgggtattcaggctttccagcctaagatgatcgaaggtaaggcaattcagcttcacccattggtaacaacagcattcaacgccgatttcgacggtgaccagatggcggtacacttaccgttaggtcctgaagcgatccttgaagctcagttattgatgttaggttctcaaaacattttgaacccggcaaacggttctccaatcacggtaccttctcaggacatggttcttggtctttatttcatgaccaaagaattgagttctacagaagatatgaaagtaaaaggtgaaggtttggcattctattctcctgaagaagcagaaatcgcttatgcggaaggaagagtatctttaaatgctaaagtaagatgtagacttccggttaaagaaaacggagaaatcgtaacaagattaatcgaaactacggtaggtagaatcttattcaaccagattgtaccaaagcaggtaggatatatcaatgagcttttaacgaagaaatcattgagaaacgttatcggtaaaattcttgcagatacagatttccctacaactgtgaagttcctggatgcaatgaaagacttaggatattcaaacgcattcaaaggaggtctttccttctcattaggagatattgtggttcctgttgagaaaaagcagatgattgcagattctatcggaacagtagatgaaattagagccaactataacatgggtcttattacagatacagaacgttataaccaggtaatcgacgtttggactacaaccaacgccaaccttaccgagatgatcatgggaagaatgaaaactgaccaaggtggtttcaactctgtatacatgatgcttgattccggagcgaggggttctaaagaacagatccgtcagttatcagggatgagaggtttgatggcgaaaccgcagaaagctggttctaccggtgcggagatcatcgaaaacccgattcttgccaactttaaagaaggtctttccatcctagaatactttatctctacccacggtgcccgtaaaggtcttgcggataccgctcttaagactgccgatgcaggttacttaacgagaagattggtagacgttgcacaggacgttatcgttacagaagacgactgtggaactttaagaggtacagaagttaccgcacttaagaaaaatgatgagatcgttgaaagaatctctgaaagaatcttaggaagagtttctttacataatatttatgatcctgaaagtgatgaattaattgctgaagcagatcaggtaatcagtgaggcgttagcgaagagaatcgaagaagcaggattagaagcagttgaagttcgttcaccacttacttgtgaagctaaaaaaggtatctgtgcaaaatgctacggtagaaacttagcgacagggaagatgatccatatgggtgaagcagtaggtgtaattgcagcacaatccatcggggaaccgggaactcagcttacgttgagaactttccaccaagggggtactgcaggaaacgtatcagaaaacccatcaattgttgcaagaagagatggtatcgttgaaatggatgaggtaagaaccattacttctgaagatgaaaacggtaatactgcggaagttgtagtttcccgttcaacagaattcagattagttgctgataacgagtccagaactccgttaatggtagctaacgtaccttacggttccatattatctgtaaaaccgggtgataaagtgaagaaaggcgatgtaatctgtaagtgggatccatataacgcggttatcattgcagaaactgccggtaaggtagaatatgaagacatcatccaaggggtttcattccagttggagattgacgaacagacaggatttgaagaaaaagtaatctccgaatccagaaataagaaagccgtacctaccttgaaggtggtagattctaaaggagttgaacagaaagcgtacaacttaccggtaggagcccacttaatggtcaacgatggtgaaaaaattaaggctggtaaagtcttaatcaaaatccctagaaaatctgcaaaagcaggggatatcaccggaggtcttccgagagttaccgaattattcgaagcaagaaacccttcaaacccggcggttgttacagaaatcgatggggtagtttcttacggaaaaattaagagaggtaaccgagaattgatcgttgaagctaaaactggagagagaaaaatttatttggttaaattatccaaccagattttggtacaggagaatgacttcgtaagagctggttcgccactttctgacggttccattactccggacgatatcttaagaatcaaaggtccaactgcggttcaggaatatttagtaaacgaaattcaggaagtttaccgtctacagggggtaaaaatcgacgacaagcacttcgaaatcatcgtaagacagatgatgacaaaagtatctatcgttgatggaggtgatactcagttccttgaaggtgctcttgagcataaatatgacttcttggaagaaaacaacagagtattcggtcttaaagtagtagtagatgccggagattctaaagtgttccagccgggtcagatgattactgcaagagaattaagagatgagaattctaagctgaaacgtgaagatcaggctttagttcaggtaagagaagctttaccggctacagcaacgcctgtattgcagggtattacaagagcagctcttcagacgaaatcgttcatgtctgcagcatcgttccaggaaacaactaaggttcttaacgaagcagcagttgcaggtaaggtagatgatcttaacggtcttaaagaaaatgtaattgtaggacacagaattcctgcaggtacaggtcttaaagaataccaaaatgtgatcgtaggttctaaaaaagaattcgaagatcttaactaaaaataatgattcggaaatttgaggtttgaatttatttttatattttcacaacctcaaaatttcgaataaaaaaatattttataacaatggacaacaatcaaaatccacaagacggaaacatcaacatcgaattaaacgaaatggtagcagctggtatctatgctaatttagctttagtaaaccactctccatctgagtttgtagtagatttcatccagttaatgccgggagtacagcaagcaaaagtaagatcaagagttatccttgctccgcttcacgctaaaagagtactttctgctcttcagcaaaacattgctaactacgagcagcaattcggagaaatcaaagaagttgagcctttcgtattaggaggaaacaacgtaaacgcttaagatttactctcaaaaataaaagaatgcctcaattttattggggcatttttattatttttaattatcaaaataaaattttatttaaataaattgtaagttgtaattcctaaaattgctattaatacaattaaaatacctcccaaaagccagagtgaccactttaaaattccaaatatttttgctaagtttttatttgtatcttcagtataagcttgtattaaccctattaatgatccaccagtaataatcaaatcatcaatccagcccactacaggaactacatctggaatagcatcaatgggactaactccatataatgtccccaaaattgctataataatagggataattttatttgatttttttgaaggttgtaatttattttccatttaattagtttataactaattcaaaattattcaaattttaatagataaaattgtggaaaaccgtaatttaatattctatatatcctcaatagaataaaaaaaaatataatttcaattcttcatttcaatatatttgtaagtcagaaatgatacattaaatatgatcaataatcagtttattattaacaaatttggctttttaggaaatgattttttaaaagagctggataaacatgccatcgttacagaaattaaagcgaaaaccgagattgtaagagaaggacagaaaaataaatttgttccgtttcttattaaaggttccataagggttttcagcctgaatgacggtcgagaactgatctattattacatccgttctaatgacagttgtctcatgacattctcctcaatctttacagattgcacaagccgcatttacgccgttacggaagaagactccgaagtattgttattcccggtatctgttgttcatgaatggctcattaaatttccggaaatcaacaggcttttctattcagaatacgacaaaagatttattgatgtgatgaatatggtaaatgatgccgtttttcataagttggataaaagagttttaaactatataaaacaacagatttcagcaaccggaaacaatcccatcaaacttacccacagagaaattgcaaacagtttgggaacttcaagagaagtagtaagccgtgttcttaaaaaaatagaaaacgaaggcgagattattcagaccaaagaaggcataaaaatacctgtaaatgaaaatgttagtcaaggctaataaatgatatttaattattttaacattttcattgataaaaacaatacagtcggtgacttttatcacacaattttaactcgataagtcgataagtttgttgtactaatttaaataaatgtgtatgacaaaaactctcttatttttgtcaatgtttgcttcagttttttcctttgcacaggaagacctgctgaaagatattgataccgttcagacgaaaaacaccgatgtttcccaacccgcttttaaagctttacaaattgtaaccgggcaatctaccaaacttcccgcaaagaatgaatggtatattgttgtggcgcaccgcttcggcgatgtaagcaaaggttttaaagacttcttcgggctggatgatgcttccacaaaactcggagttatttatggcattacagaagggatttcagtaagcctttccagagaaaccaacctgaaaacttttgaaggcggtgtaaaatacagacttgtaaaacagaatgaaaacgcgcctgtagatattgtaggctataatgttttggcagtaaatacagatctcagcaaagataattatccacatcttcagtttggggacaggctttcttatcttacacaggctttaatttccagaagattcagcgataaattttctcttcagttaacaccgtcatacgttcacaaaaatctttacgaacctactattgaagacaaaaaccagtttttggcaggtttgggaggacgttataaaatctccaaaagagtttctattaatgcagaatattttgtgaatttcgacaatcacagtttctataaaaatccgctttctttaggaatggatatagaaaccgggggacacgtgttccagcttttgttcaccaattcccaactcaattcggatattggttatttaaccaatgcagccggaaaatgggataaagggcagattttctttgggtttaatctttacagagtattttagagtatgaaaaagtttatgtacatcatttcatcagcagtggtattaacggcttgtgaaagcagaacgtatgaggaaatttcggataatactccgattgcagaagtggtaacttacaataaagatgtgaagcccattatggatgccaattgcgtgagctgtcattcaccgggagttcaggcgctggcaaactactctcaggtgaaagcaaatattgataacgttatagacagaataagccgcgctaacggagatcctttaaaaatgcctcaaggcggaagtttatcgccatcacaaattacgatcatcacgaaatggaaagccgatgggcttctcgaaaactaaaaaattaatatgaaaaagctatttttatttataacagcgttattattcaccaatcttgcttttgcccaaaaatatatggctaaaacaggaaaagtaacgtttgaagcatctgttcctttatttgaagatgtttttgcacaggacgacaataacgtcgcggtaatcaatgctgatacaggagattttgcatcagtttctgtcgtgaaaaacttccatttcaaaacaaaattaatggaagaacacttcaatgaaagctatgccgaaacggcgaaatatccgaaggcaaccttcacaggaaaaattctgaattttgataagtctaaattatccgcaacacctcagaaatatactgttcagggaaaattaaattttcatggtgtggataaagtgtataattctgcggcaaccatttatgccaaagacggaaaaatttatatgtcgggaggatttgttgccaagaccgcagatcataaagtaaccattccgaaaatggtatctaaaaagattgctgaaaacgtgaatgttcaatacaattatgttcttacaaaacaatgagaaatgtaattttatggataggaatgtttctgagctttacgttgacaaacgctcaggaaaaggcaaaatctatttttgatgttgccagaagcggaactattgctgaaatgaaagacatgatgaagcagaatccggatatcatcaaccagaccaacgaaagcggtttttctcctttaattctggcttgttacagaggaaatgtagaggttgccaaatttttaatggacaatgtaaagaacattaattataaaagccgtgaaggaacagcattgtcaggactttccgtaaaatataacaaagatctggtaacctatattttagagaaaaaggcagatccgaatattgcggatgctacaggatcgaccccgctattttgggcggtaaaattcggaaataaagaactgacggaattactgctgaaatataaagccgacaaaaccataaaggatgcacagggaatgactcccttcgagtatgctttacagacaaacaataaagaaataattaacctacttaaaaattaaaatatgaaaaaagttttactcacattatcaatggctcttgcaatttctgtaggagcgcagttttcgtcgggtacagtaaatttatcggctgctgcaatgacggtgaaattagacaccaatgcaactactgctacgcttactttaactggagacagcaattcaatgctcggaatcggtttcggatcaagcggaatggcaaacggatcagatggatttatttacaattcatcttcaaacagagattatacattcgtaggattttcctcaccttctgcagatgctacgcaggactggactcaggtttcaaacaccgtttcgggaagtacaagaacagtagtggctacaagatctcttgccggaggaactggagactttgccattcctaattctgcgggaaccattaacattttctatgcaagaactgctggaggaacgggaatatcttaccattcttcaaacagaggctacgcttctcttacgatgggagctgttttggcaaccggagaagtcgctgcacaaagcaaaaaagtagttctttatccaaatcctgcaaaagaaaccattaatttcaaagatgccgataaaataaaaaatattgatgtttttgaatctaccggaagaaaggtaagaacgataaaagctgacggaaaagaagtgaacatttccgatttgaaagccggaaattattatctggaaattacattaaaagatggttcaacgtcttttgaacagctaattaaagaataaaaaagaccactgaaaagtggtctttttttatgaaagatataaaatgataattgtggcggaaacaatgaatataattcctgctaaagtattttttaatccctcagatttaggatgggaactgtatttctcgttcattcttttagaatcgcagtggtaaataaatatccagcgaacaaaatttcctaaaatatccagcaaaaattccaatattttgtattttattcaaatataaatattaaagttgtttaaagtaatttcaaaattaaccgcaaaacggacaaaagataatgttaaagcgaatttcattaataatcaaagcgctcaaaagaataaaaatcaaagatttttaaaaactattgtgaactttttcattgataatgatcaactttaaataaaagtttagtcatcttttgtgacttttgtggttaaataaaaagtttaaacagactcattctttatttacactcattctaaaaaatgcttttaatctttttttaatcgaagaatcttttctttcaggattctagaccctaattttgcagaaaatataaatcatgaagaaaagccttcaattcttactgttatttttttcattgacagtttttgcccaaaaagataatgttgatacagaagaagttgtagttcctgatcgttacaatacggctgaagctcagacaaaaccttatgtcatcatgatttctacagatgggtttcgttatgattatgctaaaaaatacaatgcagaaaatcttttaaaatattccaatgagggagttcaggcaaaagcgatgattcccagttatccaagcattacatttcccaatcactggacattgattaccggattgtatccctctcatcacggactgatcgataattatttctacgattatgaaaagaaggaaagttacgccatgagcgataaaaaaaatgctgaagacggaaactggtacggcggaacgccgctttggggactcgctgaaaaacagggaatgctttccgcttcgttaatgtgggtaggttctgcaagcaatgcaggaggaaacagacccacctattattatcattaccacgaaaaattctcgccatctgaaaaagtggacaaagtcatcgaatggctaaagctgccaatggaaaaaagaccacatttcatttcattgtattttcctgaagttgatgcaagcggacatcatttcggtccggattccagagaaacggaagatgcggttcatctggtggatggagctattggcgaacttgttcagaaagttcatgatttaggattacaaaatgtaaacttcgtctttgtttcagatcacggaatgataaaagtggatggaggaagtccgttagaaattcccgcaatgctttttaataaagaaagatttgatttttacaattcgcagactttattgagggtttacgttaaaaatccacatgaggttaaaagggtttataaagaattaaaagctaacaaaacagaagattatgaagtttatctggataaaaaactccccaaatatcttcatttctcagcaaaagatgaccggtataaaagaatcggacagattttattgattcccaatgctcccaaaatatttttggaaaaaggaaaaaaatcatcggttggaaagcacggctataatccgcagatggttcctgaaatgaaagccacattctttgcgtggggaccggaattcaaaaataatttggtgatcgatgaatttcagaatatcaacgtttatcctctagttgcagaaattttaggattgaaaatcgatcagcctattgacgggaaattgaaggttttgaagggaattttgaaagaaaaggaataaatcaaggttgaggtaaagattaaatttaaataatctattgataacagtttcggcgagcctttggctcgccgaaactgttatcaatgtaaattgaatgtaaagattaaatgacataggaaaatggagtgttaagaaaatttaaatttagtccgttaagaaattctcactgttagaagcgcgagacaaatattaaatcaaaaggcaaatctttaattcgcgcaagttttgggaattttaggattaaattttaatttttagcggaagtttccgagtcttgaatttttgtttcttttgtttcaagacaaaaaaagttataaaataacattaagcattaagcattaagcattaagcattaaatttatccgcaaactctttcgcaaactcctccaatttaattttgccatcaacaatagaaccatgttcaataaaatccttctgaacaattccggtacggattcctcttcccatttctgtatacaattctgccatttcctgcggaactcctgcctgaagcattccgtgtagagaatcttcatctttaaattctatccaaggaagttccggttttccgatgacatttccgaaaatatttgcaaaatcctgcgctttacgaacgtcgctcacaatgtatcttatatttttaccttcagaactttttacaagttcttcagcagcagcttttgcaatatctttgggatgaactaatggaacttccgtgtgatccggataatttgctccaagaattcctgcgtttttaatcagaggaatatcattaaagaaattgatgtagaaatatcctgctcttaaaaaagtgacggatgtattttccagttcattgtagaatttctcaatagcatgaagaccttttatcggtccgttttccagaggagaatctgctccgatgctgctcagcatcacaattcttttaactccggtttgttgaactgcttcagcgtaattctttcctgcattttttgtgttttcaacaagattttcaaatcccatattgggaggagtcatcagaaaggcggcatcatttcctttaaaagtatcaactaaaaagttgaggtctgtaatagaaccgatagcggctttggctcccagattttcaatttcactttttttagattcgctgctgctgattacagtaatatcatgtccttctgcaattaattgctctgcaagaggttttgctacatttcccaatgaaccggtgatgatgattttcataatttttattttttttgttgataattatttttttatttcctgatacaaaggtatatttgtacttacttttatacaagtacttaccctaaagtatgtattcattatgacagccataaaagaaacatccaccattcagcagaataaaaaatacgcactcgattcctgtcctgtaacgtatgtcatggaaaaaatcggcggattctggaaaccgattattttatatcatctttccaacggagacaaaaggtacagcgaactgaaacgagccattcctgcggtaaccgaaaagatgctgattcagcatttaaagcaactggaaaatgacggactgatcatcagaaccgcaaaaccggttgttccgccacatgtaacctacgaattgagtgaggcaggaaaaggtttaattccggttatcagttccatggcagaatgggcatttaaacacatggagggaaaatatgatcatttaagaaaggtagcattgtaaaaatttaacgatcagaaaacttaattttcataaaccataaaccataaaccaccaacaaaaaaagccctccgaagagagccttagttaacaatatacaaagaattacaaagattgcatatcaatcacgaaacggtatttcacgtcgcttttcagcattctgtcatacgcttcattaatatcctgcattttgattaattcaatatccgatacaatattatgttttccgcagaaatccaaaagttcctgagtttcggcaattcctccgattaaagatccggcaaccgaacggcgctggaaaataagcggtcttgtacttggagcttcattttcaaactctcctacaaatcctaccataaccagagttccgtttaaagcaacggtttgcatgtaaggattaatgtcgtgttcataaggaacagtatcaataatcacatcaaatttcccttttacagcatccagctgatcatgctccgtagaaatcaccacatgatctgctcccagatttttagcatcttccgtttttcctggagttctggagaataacgttacttcagcgcccaaaccttttgccagtttaatcgccatgtgtcccaaacctcccaaacctacaacagcaactttagaatcaggacctacattccagtgtcttaatggagaccatgttgtaattcctgcacaaagaagaggagcaacagccgctaaatctaagttttcaggaacacttaatacgaaatgttcatctacaactactttctgagaatatccgccgaaagtatgacctcccaaatgtttgtccggtccgttgtaagtgcctgtgaaaccattctggcaatattgctcaagatcttgtttgcagctttcgcaatcgccgcaagaatctaccatacagccgactgccgcaagatctccgactttaaatttagaaacttcatttcctacatttgtaattctccctacaatttcatgtcccggaactacaggatacattgatccgccccagtcgtttcttgcggtgtgaagatcggagtgacaaacgccgcagtatagaatttcaatttctacatcttttgctgttacttctcttcttgcaatatttaattcctgtaaatcggcagtcttggattctgctccgtaagcttttactgtgaatgtactcattttgtttagtattaattattttgattagtttattctttgattcagaataggaaattcgttattttcttagctgcaaaattcgaaccttttagaacaaatcatcttatataaattacggaaagatgtaccaattttacagacgaaataaaacgtaggattaaaagtggtaattttgaaaagcaattaaaatttacttcatgaaaaatcaggaggttgaaatctacaatacggtttcagaatacaataaaatgctgaatcacgagacgttacatcctttggtaagtgtaatcgatttttccaaatctaatcctatttgtcagcatttgagacagtttggtttttacacggtctttttaaaagatgtgatgtgcggcgatatgcagtacggaaaacacagctacgattatcaggaaggaacactggtttttattgctccgggacagacatacggaatttctaatgcagggacctacattcagccagccggttttgctcttatttttcatcctgatttattaaaaggaaccaacctcggaaaaaatatcaaagactataattttttctcctatgaagttcatgaagcactgcatctttcagaaaaagaaagagaaattattctggaatgttttaaaaatataaagcatgaactggaacagccgattgataaacacagtaaatctttaattgtaaataacatcgaactgttcctgaattactgtatgcggttttacgaccgtcagtttatcaccagagatcacatcaatcagggagttatcggaaaatttgaaactcttctgaatgattatctgacctctgaaaagcctaagaatataggttttccgatggttcattattttgcagaacagcttaatctttcagcgaattattttggagatttaattaaaaaagaactgggtgtttccgctcaggaattcatccacaataaactgattgatgtggcaaaagaccagattttcgattccgccaaatccatcagtgaaatttcttataatttaggctttaaatatccgcagcattttaccagactttttaaaagtaaagtcggcgtttctccaagtgaatacaaaacgctgaattagtttaaaaaataaatttccacgagtacaacgagcaaatttgttggttaaattagcgcaaaaaagagatattgaggtgaagttaaagtaagaaatcactacctttaaaaagcagaccaatattgtttcatcatgacggcacaacaaaatacaggaattcatacttttcatacttctatcggtaaaatatctgcaataaaaacaaacggtgtgatcaaagcgaaaagcatccgttacgcgcgatcagaaagatataaaaagcccgttcctgtagaagaaatacagagtcacgaaattttggataaaacaccggtctgtcctcaacacatcagtccgttacttgaaagattgatccagaaaacgaatgtagagcatttcgaacccgatgaatctcctcagtttttaacaattacccgtccggaaaattttgaggcaaatgaaaaacttccggtggtagtctggattcacggaggttcctatgaaatcggctgcggagatcttcccacttcagatccttcggtttgggtaaaagaacagcatattattgttgtttctgtaagttatcgtctcggacttttcgggtttttgggtggaaatgaagaaagacctgccaatttaggcttattcgatattatggaatctctgaaatggattcagaaaaatattcacagttttggcggaaatccggaaaatgttactcttttcgggcagtcttccggaggcgatgcgattgcacatctgatgatttccaaaggaattgatggtttgtttaaaagagcgattatccatagcgcgccgcttggtttcaggaagaaaagaagtaaaatgtctttagaatttttcaataagaccgattttctgaaacatgaaaaagatcccctgaaaatggtggatgaatacgtgaaatttttaccgtcattcagaaaatatggtttaaaaacggcgatgcctttctgtacgcaatatggttttgcccccttatgcacggaagaagaaagtctgccgaaatggaaagcgaatgcgaaaaaatatgatgtattgatcggttccagtcatgatgaaacggctttttatgtaaaaacggctcaggaaggactttacacgtatctccacgaaaaaattctcaacaaaatcgtccgtaagacaacagaatccatttacgaaaaaccggcaaagatttttgctgaaaattatgcttcgggtggcggaaatatttaccggtttaaaattaagtccgttctgaaaaataattatatcggagcttcccactgtgtagatcttcctttgattttcgaaaatcaggaagcgtggaaatcggcagaacttttaaaagatgttccgtggaaacacattcaggaaaacggaaaaaaactccgtgcattgtgggcagaatttgcaagatcagggaaaatttccgatcattcagaacgaccggaaattcttgaactccgaaaagtttagttttattttttaaacacgaatatcgcgaattttctacattttttaaacacaagtgtcacaaatattttcactaataacacaaatgaattttagatagcttcatttaaaattgtgctatttgcaaaagtattcgttttatttgtaaaagccatttgtgatattgtgttcagactcattcagcaagccatacacttacatttcccgccggaaccgggaaatttccccaaccgttttcatcgatggtaattttatcttcaaatcttcccaaagcatcataaaacgtttgtccgatgtatctttcgcccatttccataggtttttcgtacgcatctttattgcttaaaactaccgcacatccagaatgttcctcatcaccttcacgaacccatccaagacaattggcatcctcaaaataatctctctgttcaccgtaagcattgttttttctggttttcagaagttcttcaataccgtccactttatttaaaaatatttcctgatcattgccttccttatctttatccacataatgcgctccgtaaagatccggataaaatacacacggataaccgtcttttctcagcagaatcaatgcatacgccaaaggtttgaaccattcttcaactggagcttcaagatcctgtaaaggctgtgtatcatgattatccacaagacttaccgagtgaagcggatctgcctgagtaaggctttcgtcaaaaattctccgcaaatcgtaagaatttccttcgttggaagcggtgtgaaaattattttggagagaactgtcgaacagactcatgcatccttcagtaacttctatgtatttctgcaagagattcagatatccgggagcccaatattcgccgaccgcaaaaatattttttccggtattggaacgaagcaaagtaagccattctttataaaaatcaaatgaaatatgctttaaggcatccagtctcacgccgtcgaaatcagtttcatcaaaataccattttgcccagttgttaagttcttcgcgtacgaaaggatttctgtgttccacatcattgtacatcaggtaatcgtaatttcccttctcatcgtcgatcatttcttcccagtcggttccgtattcatttttaattttaaaaatctgcgaatccattccttctgcataatccacgccgctgaagcaggtgaaattccattcaaattcagagtattttttatttcttccgggaaaggtaaatttggtataagactgtatttctatttcatccgagattattttttctctgttttcttcatcaacttttaatgctttaaaggtttccagttcatcgccgcctcctttatgtccaagtacaatatctacaattactttaatattgttttctttaagcgcctttatcgctttcaggtaatcttctttcgtgccgtatttggtgggaatcgttcctttctgatcaaattctccgaggtcatagaggtcgtaagcgtcgtagccaatagaatgacctcctgttgcgcctttgtaagcgggcggaaaccagactgaggtaatgccgagtccggctaaatattttgcgttttgttctgcttctttccacagtttgctgtctccttctgtataccagtggaaatactgaatcatcgtttcattcataaattgtaaaatttggttactacaatttagtgaaaaaaaacggattattgatcttcgaattctttaaacggaatttttagttgaacggaaacctgttttttttcttcagtgttgaggtgggagagagataatcccaacagtctcaccggcttatcgaaaggtctcagttcccaaagtttttttccggtattgaaatattgttcggcagaggaaaaatattcttctttggtaatgcttcttgtatacagtgagaaatctttgtatttaatttttaaagttaaagatcttcccagaatattatttttctgcaatctgttttgcagttcttcgctcaggctctgtaatttttcgtcaacctgctgttcatcaaaaaggtcttcaaaaaaagttctttctactgccacacttttctggatgcggtgcggttttacttccgaatgatgaattccgcgaaccacgttgtaataataagctccggattttccgaacagtcttgttaaatcttcaatggatcttttctttagatcttttcctttataaatgcctaagctgaacattttattagccgttacttttcctactccataaaatttttctaccggaagttcttccagaaagccttcaattttgtcgggatgaatggttttttgtccgttcggtttgttgatatctgaagcgactttggctaaaaatttattcacagaaattcctgcggaagcagtaagtccggtctgttcaaaaattttctgacggatctctttggcgatctgattggcagattccattccttttttattttctgtaacatcgagataggcttcatccaaagaaagcggttccaccagatcggtgtattcgtaaaagatttcacggatctttttagaaatttctttataacgcgcaaagcgcggaggtacgaaaataaggtgcggacatttttcttttgccgttttgctgggcattgcagaacggactccgaattttctggcttcgtaacttgccgccgaaacgacaccacgatgtccgcctccgactgcaattgcttttcctttcaattcaggattgtcatgctgctccacagaagcatagaatgcgtccatatcgacgtgaattattttgcgcatgggaaaagaagaatccataccgcaaagatatggattcctgtatttttaattattttcttttgtcctgaatttatttaatctcaaggatagacaaaggtttatagaaatgaaatgtttttaagataaaacaaagccgtttcacttattttcgaaatacaattgaataaattttgtcttactttatttaagcgaagcgcctttgtataacttaaaataatagacaatataaaattatgattgtccgtaatttgtcatcattagaaaacctttgagttctttgctgagtgaatagtttatgctgagcttgtcgaagcacctttgcgaacttaaaaacagttagtatataaaagaatcttagcgatcctttgcgtaaaagttaagcattatgatcaataacagataatcatataaaaaataaagctttgttttactttgcggtaaaaataagaattacttcaaaagtttatcaattgttgcctgtatttccggatcttcaggagtaatagcgtagtattttgcaatggcagatttctgatcaatcaccatataacgtggaatccagttcagatcaacataattgttgaaatcatttttccagccggaggaaaaccagtagttttctttgtctttcatctcaaatttttccagacttctttcaaagctttctttggaacggtctaaagatagaaatacaaaatctatatttttattgttttcttccagttctttggctttcggaagcgcatttaaacagtctctgcaccatcctgcccaaaaatcaataacaagaactttacctttatgctgatcgagaatctgctgaatggtaaccgtttttccgtcttcatcttccagtttctgcgccaaagcttctttggagaaaccctttttcagaactttcggcgcctgttgagaacagcctaatccgaaaattcccatcattaatagtaacaacagttttttcatgttcaaaaaaattatgtatgcaaatctagacaatgccgtccaatctgtactgattttttgatgacttaatgaaaattgatgggattgaagatttctattgaatttacaattaagaaattcacaaattttatcgttctgaaaacatcgacaaatattaagtctgtttaaactttatttaaccgcaaaagtcacaaaagatctactaaattttttatttaaagttgattattattttgaatatccgttaaacaacctattactatgcactgatatgaaaatcaattatttataacaggcacttcgacaagctcagtgtgacatctctaataccaaatgcttgatttttagcgatgtcaagctgagcctgtcgaagctgtaggttaataaacggacaataaaattattataaatgaaaaagaaaacaatagtttttaaaaatctttgatttttattcttttgggtgctttgattattccggaaattcgctttatcattatcttttgtcccttttgcggttaattctgaaattagtttatcacaagtctattgctaataatcttaggtttactaataatttttcacgaaaccttttaccacagcaattacattcggcatggctgtattggctgcattcagaacttcttcgtgagaaacggagtgggcaatatcgggaccgcctaaatcggtcacaacggaaataccgaaaacatccattcccatatgtttagcaacgattacttccggaacggtactcattcctacaagatctccgccaatggctttaatcattccgtattctgcgggagtttcgaaagtgggtccctgtaaagctacataaacactttggtggacggtaatattctgttcagaagcaacattttgtgcaacggagatcatttttctgttgtatggttcgctcatatccacaaatcggggaccgaaagaatcaatgtttctgccgcgaagcggatgttcaggcatcatattgatgtgatcccgaatgattgcaatatcaccgatcttatagcctggattaattccgcctgaagcattggaaagaatgagatttttaattcccaacagataaaaaacacggatcggaaagaccaccgtttctattgaatgcccttcgtagtaatgaaaacgaccgctcatcatcagaactttttttccttccagaattccgtagatcagttttccgccgtgtcctgcaacggtagtctgcggaaagttggggatttcagtgtattctaaagtatgaatagcttccacttcatcctgcagtttgcctaagccggagcctaaaacaatggcaaaatcgggagtttctttaatgatgtttttaacgaaatctgcggtctgcttaattttttctaacataatctaagatgatttgattgaattcttcctttttatcaataattacattgatcggccagtagtacacaatatctctaagataatcaaaacttttcaggcgcacgtagtctttttcagtggttaaaatcaatttatattcccctaattttttatattccgctacgatatttttgatgtctgcttccgtgaaattatgatgatctctgaattttaagtgttttaccctttgcgaaaattttgcaagatgggtgaggagaggtttaggattggcaattcctgtaattaaaagaatatcataataattcaggttgttatcgggaagcattttttctcttccgtatacattttcgtcgtatccgatggatgaaaagaatactttctgtgtacggtccggtcttattctagaaatgtaatactgtttggtttcctcggtaagttcatcgggacatttgctcaccatgatgatatccgctcttttggatcctgctcttgattctctcaaatctcccgccggcaaaagatgatctttaaaataaggatcattaaaatcggtcatcatgatgttgaatccggcttttatcgctctgtgctgcattgcatcgtccagaaccagaacatcaagatccatatcgctgattacttttttggctccgggaactctttcttcggaaactgcaattacaaaacggtttttaaagcgttcaaacaactgcatggcttcatcgcctacagttttgtagttgctttcataattcgtaacagcatatccttttgtaagtcttccgtatcctctggaaagcacgccggttctgtaatgtttggacaggaaatgagcaagatacatcaccatcggcgattttccgcttccgcccacagaaaggtttccgacacagattatcggcgttttgaatttcacagatttaaaaattcccagatcatacattgtgtttcggatacccgttaccatgtgataaccgagggaaaaaggatagaggtaccatcttttcatacgtttgcaaaaataggaaatttcgcagggatttggatgaatatgggagctacttttcgatatttatttaaaaaatctgttattgattatcatcaaattaaagtatttttgtagagttataatctgctgtgcattttaacttgtctttctataataagtgaaatgcctttgtttatctttaaaatatttgggaattgtagataaataaaaatctttgtatgtctttgcgtctaagttctcgcaaggttaaacaaagttttattaaaacaattttttttaagttaaacaaagccacttcgtttatggaagaaatacaaattgatattgattcaaattaagttatatgtacaaataaacaacagatatttattttattaccttgagatattttatagaattttcctacaacggcaagaattatttcggttaccagattcagccgaatgctatttctgtgcaggaagaactggagaaagcactttccacgattttaagagaagagattaagacaacgggagcgggaagaacggatacgggcgttcatgcgaagaaaatttttgctcattttgatacggagaaaattttggatcaggaactggtgagaaggctgaacagttttcttccggccgatatttccattaaaagaatttttcctgtaaaagatgatttccatgcgcgttttgacgctacttaccgaacgtacgaatattatatttcgcttgaaaaaaatccgttcacggaagaatcggcgtggcaacactggagaaaacctttagatgtggaaaaaatgaatgaagcctgtaaaattttatttgaatatgaggattttaccagctttgcaaaattacacaccgacaataaaaccaacttctgcaaaatgtacaaggcagaatgggaacagaatggaagtgaactgaaatttatcgtttcggcaaaccgctttctgagaaatatggtgagagctattgtgggaactatggttgaggtaggttcaggaaaattacagcctgaagacgtaagaaaagtcattgaagacaaacaccgaaactctgcgggaacttctgcaccggctcacggattgtatctcgtggatgttggatatgattttgagtaatatttaaacacaaattccacaaataattccacgaatattcacaaataattttagattttctttattagatttgagtcatttgtgaaaaaatattggtgtaatttgtgtttaaatgaaaaataattaaaaaaactaataacattatggaggtcactgaaaaaccttgcatcttacgacagcctatttatttaggatgaaaaataagagcttattacaagatttaaaaatccgtaataagctttttattttattgggaagttgtttttttgatnnnnnnnnnnnnnnnnnnnnnnnnnnnnnnnnnnnnnnnnnnnnnnnnnnnnnnnnnnnnnnnnnnnnnnnnnnnnnnnnnnnnnnnnnnnnnnnnnnnntgaacattaatcctattgctgaaaagttgatctccaccagtgcttttgtcctcttcggattaacgtgcataatttattaaaatatatcctgaatttcaccaactatttttcagtacattaccttttaaagaaacaatctgatgtgcattttctgcttcaattataaggagggataatgaagagtttttcaatatgccaaacgtaatatttcgtgctttatgataacataatataaaagaagcctttcgttagggaggtttatttatttagagtaatctttgtttttttaaacttttgataatatcttatcatattctttctcaaaatcaacagtatttccgttatcatcttcgccatcatagatcacatatccaaagtcgaaaatcgtatcttttatctctcaattgtagaaccctccctaattcgcaatataatagtaaaatccgtcgccgatattccgggaactcatgatctcaaacaagtgattgttgttttccagcattcccgatggcgaaaaataatagccgtaagaattatctgaaaatccgtccagaagaaagaacattcccaagtctgtttttacaatcgaataaatatttactttcttcatctgttcaaggatctgttgctgcaacgagctgaaacggtagttcccttccgcttttatttttgccgagatcgggaaaggcgatttttgcggaatcacataagaccagtatccattgttttctttaaaaatattatccaccctttgcaaagaactctggtttacataaattaaatttctgctttttcccaccagatcagccagtgttttgaattccgaaaaatgatccttcagaaactgaatatgcctgtcctcgttaatcatgccttgttttaaaaactgattcggtttgtctgctgcttccttttccgtcagttcataccgctgagaaaaaccaccccagaaaaaattggagatttcgcttgatgtgcgtaccgaatcaagcgcgtagattttctcatgctgtaaaggtcggatatcccatttcgaaaaaggctttgaaaacttcagatactcttccagaggaacttttttctccaccgtcaaactgtctaaataattaaacagttccacatcatatttttcggttttatttaaatagtcctgaccgaaaacagatgccgataaagcgaaaaacaacagaatgacaattttttgcatagaataagaaagcagtttcgtgattatttattgaattgaggaaacaaatgtaatgaaaagttgagaagggtgatgaatgaaagatctttttaaattttttatttaatacaatactttcattattacatttcaaaactattcctgtcattctgaatgaaattttgcgaagcattatgcaatgaaaaatctattgaaaatgattgctttgaagattagatacacgtgcttttttaaccacaaaagccacaaaagattttgatgcatttttaaaagttaacaagcataagaataaaagaacacaacagttttaaaaaatctttgatttttatgcttttgagggcttttattattctgaaacttggctttatcattatcttttgtgccttttgtggtaaaataactctgtcattcagaatggaattttgcgaagcattatgcaatgaagaatctattgaaaatgactgctttgaagattaaatacacgtgcttttttaaccacaaaagccacaaaagattttgatgcatttttaaaagttaacaaggataagaataaaagcatacaacagtttttaaaaatctttgatttttatgcttttgagaacttttataattctaaaaacttagctttctcattatcttttgtgccttttgtggtaaaattttcctgtcattcagaatgaaattttgcgcagcattatgcattgaagaatctctttaaaatgactgctttgaagattaaatacacgtacttttttaaccacaaaagccacaaaagcttttaaagttaacaaggataagaataaaagcacacaacagtttttaaaaatctttgatttttatgcttttgagaacttttacaattctaaaaatcagctttattattatcttttgtgccttttgcggttaaattcctctgtcattcaaaatggaattttgcgaagcattatgcaatgaagaatctctttaaaatgactgctttgaagattaaatacacgtacttttttaatcacaaaagccacaaaagcttttaaagttaacaaggataagagtaaaagcacacaacagttttaaaaaatctttgatttttatgcttttgagaacttttataattctaaaaacttagctttctcattatcttttgtgccttttgtggtaaaatccctctgtcattcagaatggaattttgcgcagaattatgcaatgaagaatctcttaaaatgcagttatttttagattttgcgactccacttcgttgcgctcaaaatgacagcagtatagattagaatatactaagtgtcaatgcttatcactcccatatttttctgatgaatctgatcagttttggcggttcatctgtatttatttcgttcgtcgggacttccttttcctgcaaagtttcaatcgtattttcttcaatttatatgcttttaattgttgctcaaaacgttcattttcatcgggtggctgttgtaaggcggaacttcctttatgagcgtgctgaatataattttccggcggttgtgggagtgcattcctgcattcttctgagcagacattcaccagtaaaggcatcacatcggttcctacccaaagggagatccagagctgattggtctgttcatagctcattgttttgcgacacacgctgcattgtacggtttcgcctgagtaacggatagggttttggcttaaatccggaaagcccattctgtttttatagttgccgtaaacggctcttgtgctcattatgctgctttttaaatttttgcagtgggtgatctcataaggaaaccagtgcaaatcgtaggaggtgtagacctcaaaatattccagcgattccatttctccgatttctggaggaatacgtttgagtttacttccgtacagccggactttttttacctttttaagttttgaaatcgtttccggaagggtataaatctgggagaaaagatcatagccaagttcttccgcaggcgaaaattcttccctttcgtcttcggcaacccaatcgatataatcacaaattttcttccatgccacagaatttctatcctgaacatgattctcaattttttgtattcttttgttcatgaaggctatcgttttttttaaagaattgcatttcaaagatagaaaatttgagcgtaggggatggatatgaaaaaacctgcggtgaggcagggttttttgtatgttaatcttcagacaatgaatcgacgtaagtaaattttttatttattacaattaatgtataattctaatggaagaacgtactgttcctgaatagcctcctaaatctacagttatataccacctccctgaattcggaactaaaactctgtaaggtgaatgagttatgtagcctccataatatttatgatttcttcctaatttatagtttgaaaaatttaaattatccattagtttgacgttcgcagcgtttcctaatagagttatctcaactatttctccaccatttaaatatcctaaatcatgtacttgaaatttcatttttttaaattatttttttttcaatacttgtaaatttttcaggaaagtttacaaaaattaactcacaaaatcttcctaaataataaccttcaaaatccgtaatttctcctttataagaactaaatttaaaaatttctaaagataaataatcattgttattatttgatgttagttttgctacacctttttcaccccattgtcccaaatgttttaaatattttactccattaatagtcgatatatcccaagttgaaagtttaccagcttcgactagcttaatgatttcatttttaaaattaattgcatttgatgttttaaattgtaatatcataatatttttgttttttcaaaaataaatagtatcatttaatgaaaaatacggttttccataatttaggtttatactttattaaattattaactcaatgggattgaaattaagttattgaatcggaagaattcctctattgttttcttccattgaccattaaacttgataaacagttccttcaatttgatcaagcaataaaaagttataagtattttctgtaggataaagagtaaatcttccatttacctctttttcttctgcaacaagagatatagaatttaaatttaaaataacacgattatctccctcttttactgcaaaatgaacttgccacattttaccatttcttgtatttaattttataaatgtccaaaagtttttagttggaaataattgatacattttatcagcactctgtttatgataggctgaattgtttatttttttttgggcaggcaaacaatttagagacaaaataaaaataaatgagagaattttattattcataacatgtgattatttaaaaggatattgttatttgttattacaaattataagctttcaaatatttaggtaatacatattaattaaatattttgttataagcttctccaacatcttcaagaatactttcccaataatcaataataaatagagctaatttgttattggttctttttgaaaaatagacatctgcagtaaaatatccatagaaattaccatctctgtcaactagaacaggaggattagaagcatatttattaaagggtgagtcgctactatatttgcctccgtagtttccatacttattccaaatagaattggaactatatttagaaccattattaccatatttattccatatagagttatcattatatttgtcacaatctaaacaccccagaaaaacatcatgattttttcctccaaagattaaaatgttttgagcaagagtaatattaaaaacaaataaaagcaaaatgaatagataattttttttcatacttattttttaggttaattaattatttttatcaattgatgctcatatacatacatttcccctttatattgatttgtgtctatttttattaaaacaatgtaatcgaaattatttgggggatacatttctttttgattatacgtatgcgtatatggctcttcttttgttgccacaacaatgcattttttcccagaagctatttctaatacttcttcatttattttaaacttcatttttaaaagttacattattaactaatatcattaatctgtaattacctcaaaaggccaggtataatggctagatgcaaaaggtcgatttccgtttgttggaactatgatctttgcttttattctaaattttgttccaactggaaaatcagttgacagaactttggaacattgcacaaacatcgtttctaaataaggatcttgatttggaagtggttttatatgaaccggtccatgtttgcctctttcatttgttaaaacactttgtacaataatataatcgtaatccataattatttgatttatagttataaatactatatttcaaatataaaaaaacgatgattataatcctttccgtatttctacggaaatttatagttcgtaaaatcttattaatcttctttaaccgccaaacctctccaacaatctgcaggaaacttccggagtcctccggagattaaaaacaaagttgtttgcgaattccgtacatctccggaattctcctgcaagttgcgggaaacctccggaggacttctgtcgtttaaaacaatagtgtttgtaagtttcggagttctccggaggtttaaaacagagttgtttgtaatcaaagaagttttttatatttggttttttaaattattaatcaaaaaaacgcaaacaaaatgaaaattgcactcacaaaactgagtactaaagatctcgctactttatctcaacgtattctctcaaatgcacagtcagggaaatacactatggttgataatcatcctcttactttggctttacagaattcgtacacagaatacgataaagtctatgcaaagcagagctacagcggaaaagggaaggatgtggcaacggcagatcatgaaagggatgtcgcttacaccaatctgaaagcctttctcaacggctaccgcaaactttcttctgcgcccaattatcaggctgccgaagatttgtacaatgtattgaagaagtacggactggctctcgaccgtttaagctattcttcgcaaaccgcacagatgaaaaagctgatcgaagaactggaaactcctgaaaatatgcagaaaatcggactactttccatcaatgctgcattcacagaaatgaaagccaaacatgaggattttgagactttatttgccgatcaggctgaagccaacgcagacctccgacaaatgacgagcgcaagtgcgatccgcaaagaccttgagaaaaacctgaaagcctacatcagtttattaactgtgatgaagggcgtttccggctgggaacttctgtacagcgacacgaatgaactggtaaaggccgccaaaaattcttcgctgcaaaagacgaacagcgaaggaaaaacccaaacttccggaaaccagccgtaaaatcaacgatttgttgattgctgcacgtacttttttaaccacaaaaggtacaaaagattttgatgcatttttaaaagttaacaaggataagaataaaagaacacaacagtttaaaaaaatctttgattttatccttttgaggacttttattattctgaaatttcgctttatcattatcttttgtgccttttgtgtttaaatttttctgtcattcagaatgaaattttgcgaagcattatggaatgaagaatctctttaaaatgactgctttgaagattaaatacacgtacttttttaaccacaaaagccacaaaagattttgatacattttaaaaagttaataagcataagaataaaagcgcacaacagtttaaaaaaatctctgatttttatgctttgagaacttttattattctgaaacttggctttatcattgtcttttgtgccttttgtggttaaattcctctgtcattcagaatgaaattttgcgcagcattatgaaatgaagaatctatcagtacgagatttttcgactccacttcgttgcgctcaaaatgacagtgttgcagattaaatggcagtgtttttaaacacatcagtcacataagattttataataatttctaagctttagataagaacacattagctttaaaaatctttgattttcttctcgtgtgatcttttatatttggttggaataattgaacttatttgattattaaaattaaatttatgctgcaggttttgtatcttttgcagataaaaacttttctaaaacctgtaaccatagaaatcggatatgaggaaatatttttttagtgtattgttcggggttttattttctgttcccgcattcggatgcctgaacggagaaacacttcatctcgaagacggaaccattctctatgaagactatgaaggatatgttccttatggtcattcttttaccaataccgaagaactaaataaaatactgttatcgctggaaaagggttacagtgaaacaggaaaactgaattatctttcagataaaggactgatcctgattattcagggaaaatacaaggaagccatcgaactttacaaaaagatcgaaaaagcggaacccaaccgatattctaccgcttccaatatcggtaccgcttatgaacttttcggtaataatgccgaagcgttgcgctggatcgataaagcagtaaaaataaacccgaattctcactacggttccgaatggattcacatcaatattctgaaagccaaaatgaaaggcggaaagttgattaattccagatttttaatcggtatggatttcggaaatggaaaatttcctgaatcggaaagaggtaatggggaactttttgttttaagaaagcaattgtattaccaacttaatgagaggatttcttttgtaaaaccgaaggataaaatcgtagcacagcttttatttgatctcggaaatatttcttatctgatgcaggaaaaagaagaagctgcagaaacttataaaatagcaaaagagtacggttttaataagcctgttcttgaagaaagactggcgttgtatacacctccggtaatcgatcatgtacaaaagaaagcaattaaggaaattaagtttcagaccaaacccatacgaagaatcgaactgattagtttttgtgtagcaatcgcgtatctgctattttcgggagtgattgtttttgtattcagaaagaaaattttttaatctcaacttgttttttatgaataaaatattttacatttttctatttcttgctctggtttcctgtaaaaaagatcatgaggtgaaaaaggacgaatgggattatttaaacagcagttttaataacaaagaaaacctgagcgatcttacgatgcactgtatgtatgatctgttttctgtaaaaaggatcaatgattcattgttctacatcgggctttatgaatttaaaggatggaaaaaagattacagaatctatgaagataccgtaaaattaagcgagaataaaaagattacagattcattgggaaatcagaaaaagcagatcctaaaattttcgaacaatcatgatgtggatcttgaaattgagatacataaaattgcagtgcatttcgattcggtttctctctacgaatataacggaagagtaagcatcaataacaaaaagcttcagtatacctgcaaagatttatttgtaaagtaaaaattgtttttcatcaggaaaatgatatttttaaaggatgaaattattcacgataaagcaaattttatcttcttgtcagcttttagatgaagcagggaatatcgttgcggaaaggctggctaattttgttttctcaactaatgaaagactgaaaatcaaagatcaaatatacaggattaaatattcaggtcttttttgggagaaaactgaatactttgatgaaaagggaaatgttgtcgtaatgattgatcgcgtaaaccaaagaatatttcattatcaggatcaatataccgaaatatatttctacagatcaaagggttttatcaacataactgtttctttataccgttttcaggatgatgctttaatgatgacattcagcttcagaaattctttttttaaacaaaagccgaagatcgaaacagcagatgatttcaacaatctgttgcttttaaccgtattttttcatcacaatctcagagaatctgaagattaatttgatgtgattttttttgaaatactccccttaaaacgaaaaagcgaaaatgattagtaagtaaaaaaagctgaaaaaccccattaataaaaggattttgggtgtgtttaaccctcggattgagaaaaaacgaaacgccgaaaaattactatttgctaccattttattactattaaaaaaagatttccgccatcatacagcccttttcggggctttttattttctcatagaaataaatttactattctacataaaaaccttgtaataaggcgttttcgtatgttggaataaaattatctgatcatattgatgaggaaaacaatactggattttctgtatttgtagatttgcccttaaaataatgttttttgagttggggttacagttggggttacagttggggttacaaaacctgttttttttaaccggattcagatgtatataagggttaaaaaagatcaaaaaaagcatcattttgaattattcaagggggtatagggacatcgggttttaagctccttttgctgattatcagcagtttaaaacatcgtattgaatcgaacacttgcttttaccaatgcaatggcagtaatgtcttttattttaaagtcttttggttgatgatgtggattttggcttaccaatttcacccattcatttccgagttctgatttctgtacatatttgactgttacatactcctcctgccctttagtaagaatacttaacaagtacatttcaccgaaaaatatatcatccaccgtaatttgcttatatagaataatatcaccggattttaaaagcgggtacatactgtcaccggttacattaatagccccgtcacattttggaagattgggaattttaatggtttgcagtgctttgtgaggagctccactgtcaaacaatgcctgaagccctgccacagcagaaaaatcataaaagggtacttcctgattttcaataattccatcttttgtctttctattgatactcaaaggcgttataataggttcttctttgatcatatcaccttttccatcaacaaaccatttgaaatcaaataaatcagaatattctgaattagcaagtttatgaaagaagtcaaaacttggttttgctttaccgcttaggatatcataaatagtctgcggtctattgtaatctaatttcttagcaaattcgggagcgttaagtccgataaaatcaagcattttctgcaatcttgaagaaacttctgtattttctttcattttaattttgttattaagaaagttctgtatatctttgtcaggacatttgaacaaatttataacaaaaatttgatttatcatggaaaataagcaaaaagaaaaaatttattatggcgactatcagctacttggagaattattatgtgtctcttcagacgcagcccgtaagagattcaagcggaacgaaaaagccgcagtaaaagcaatgggtatgatacaagaaaaccggaagaaatttgtattagactacagaaaaaacttacaaatagattagaatagatttattaacacgttaaaaaaagagattatgccacacaattggggaaatatattagttgttacaaaggacgaattaataccaaaatattacaatacccttagcgcgcttaaagttgaaattcaccgatacaaagatttaccttacggaattaaaaaagttcagaaggggggcaatggcagacagatgtatattgactttgacagcctttcaaaagatgtacaggaaagcatgggcgatccgcgcaaaatgagacaccctttactttcattttttgaatttgatgccacagcagtacgttactataccgatttcagatttgaagatggtacaccgttaaaagaaagtttcaaagaggaatatatcaccaacgccagtgtgcttattgcagccgaaagattaagacaggcacgtttaaccgagtggaaaaaattaagaaaaacatccgggcgcgggttaatgccctctatcattaccgatgttacgacatttaatgagtttctgccaaaggtatacaacactacccacaccatcccttcatcccatagaggctttgaccgggtttggaaacctttctttcattcttttgacgaagggctcaattttgaaagcctgatttccggcaaactgaaaaaccagaaccgaaaattaatgacggacgaaatgatggctttacttaatgatatgtttgcaggacaggactataaaccttcccggactcaggtcgccgatcagtatcaggcttttttaaacggcgaactggatattatcagtaaagaaaccggagagcagtacgaccgtaccaacccgaatttcagggaaatgtccgataattcaattattgcatggcttggaaaatgggaaaacaagatcggaacctttgccaagcgttccggtgaccgtcagaaattgatgcaggagttcactcctccacataagctgacgaaaattaaagaagcgggaacgctgatttccatagatgacaggcagcctccattcatgtataatgaaaacaggaaacgtccctggttctatatgggtattgatgtgggaagcgaagcatggacgtgttgggtttgggggaaggataaaaaagggatcattatcgagttttaccgccaaatggtcagaaactactcagaatggggctttaaccttccgcttgggttggaatgcgaaagttcactaaacagcggatttaaggatactttcttacgtaacggggcaatgtttgacagggtgaacatctataagaaccgtgcaaggtcaaaagttgtggagcgaaaattcgaggaattgagatacagacatgaaaaaagccgcttaggatggatggcaagaccatacgccctgaaagaagaaaatcagaaaagcggagaagaagaaatcatcatcccttttgatacgattgtagatcaatcgctcagcgatattgaaacgtggaacaatatgcctcattccgtttatatcgataaaacaaggtgggaagtattttgtgagatgcagaacaaaaatacacagcctaccaattggacggcaatacttccccacattggtaaaacagaaacatcaagctgtaacgccggaattatcaaattcagaaacacaacgtttgttttagggctggatggtgaaattgcgctgggtgatgatttaataaggctcctgaagtatgtaaatggcaaagagtttacgatttactggcttgacggaaacgacgggaatgttttaaaagcgatgatctattacgatgatttgatgctttgtgatttggttccacagccggaatattcaagatcaatccatgaaagagatgagcagggcgagttgaatcgcagattaatgagtgcatacgagaacactgttaacaaattcatggctcaacgtaaacgtgaaattgatcaggtcttaatcatcgaccaccgtaaaaaaacactgaacaataaatttcagattgcaggtcgaaaaaaatatacgcctaataacagtaccccggaggaggtgttctcagacgctgaggaaagcagctacaaccacaactcgaatacatcaaccgtgagaagttgggcagccaatttttaataaatcaaaaataaaatagatatgataacattagaacaaaaacagaacatccgtactgcagtacttaacggcagggaaaaattcaaaggcacagataccgcttacgcaaaatcattgggtatcgacagcatggcttacggtcagataaaagatggaatgattgagaatatattgtcattgggacaatggctgaatataggcagcaaattccaaacggcaaagaatgactacgaaatgaaattggtaaaaacagaggtttatcttgcgatggaagacaacttcaatttttgccaggctacaaaaacatcaatgattttggttgatgactgcgggatcggaaaaacacgttgtgcaatggatattgtctccaaaatgaaaaatgcgttttatgtggattgttcccagtcgcagactaaaatacgctttgtaaagcaactggctgccgcattaggctgcgataccaccggaaaatattatgacatcctggaaacggtaaaatatgccttgaatattattgaaaatccgtttgtctgcgtggatgagttcggagatttagaatacaatgcctatttggaattaaaagggatcatgaacgccaccaagcataactgcacttggtacgcaatgggagctgacgggttacgtgcaaaaattaccaaaggaatcaacaatcataaagtgggctttgcagaaatattcagccgcctttccgatgacttcgtaacactggttccgaaaaatcctgaggaacgaaaagaattttatttaaagctgttcggggatgtagcctatgtaaacctgaaaaataaaaatgaggttaacgaagtggttaaaaaatgtatggttaaagtcgccaatccatttgaaggaaagcaaaaaggggaacagggcgggcgtatcaaatcactcagatatttagaaacactcttaaaggtcagggaataatgaaggcactatcagtaaaacaagcgttttccattgtgtttaaactgtttgaatttactggactttggcttcaagcttttggaaaaccggaaaccaccggtttttggtacttgggtggaggagaaaagaacggaaaatcaactttcgccatgatgctggctaaataccttaccacatttggaaaagtgctttatgtatccgcagaagaaggattatcaaaggacattatcgctgccatgaaatttgcgggattatcagacaaagacaaaaaatttcacattatagattacgagccgtgggcagagcttcaggctcgttttagctcccggaaatgcgctaaaatcatttttatagataattcaaccatttacagggacgagatcacaaggaagatggtatcagaattgaaaaagaaccattccaataaattaataataatggtttgccacgaagtgaaaggactgccggacaatgctttggcaacaacatggagaaagcttgccaaaattattgttcaggcagaggggctgaaagccattatttccgggagatgtccgggaggtacgttaatgatcaatgaagaaaaagcaaacctgtactgggggacaaaataaaataagaaaaaaaatgaataaagacatattattaaaaattctacaactggacagccttgtcaggtttttagactggagcgaaagggtaaggatccatttgtacagaggagagaaatttaactctacaacgcccaaaattctggcagcgtatgagtggatcatcaatgaaaactgggagccaccggtgatgcattacggggaagaccgctttcagtatttccatgatccggagttagacctgtgggttgaagctgaaaattatttaaactatttcccggaatacaagccggatttaaccaaacttatattttaggacatggaagccacagaattattggacgagattttgaaaaattacactttggcaacaaccgtctcgcagcaaatacaggctcatcaaaagaatatagcacttttaaatggcgaatcaaagaaagcctacgataaggggtataaagatggaaaacgcgacggaaaaaaagagaaaattgacaacttaatacaaaagaactaactatcaaaaataacaaattatgaatattaatgaacttttagaaagaccaattaacgaattgtctgcagaagaaatggaagcggtgctgaaccataaaagaaaaatggaggtagaacaacaggaaaacgaaaaacgcgcctatgaagccgaaagagacagtgatatgggagaattgattgccttagcccttgaagttgaaagcaaatcgtgtttattgaaaaagcttactcatgccaagatggaaaaacaccaggaaaaattaaatgaatacggaaaaatccgtagcaattctaaaggcggctttaccttaatgcacagcgataaaacgatcagaattaaacgccgccgcgatacacaacccacttgggatgaaagaagtacaaaggctttggagctgattcacgcgttcttgtatgatactgtgaaaaagagggacaaggatttatttgaaatgctgatcggatttttagtaaaaaacaaaaaaggtgatctggactatgcaagtgtaatgaatttactaagccatgaaacgcgttttgatgatccaagatggaaagaagggttaaggcttttaaaacagagttacagcaattttctgaaaggttaccaatatgatttcgagaagcagaatgaagagggtaaatttgaaaggatagaacttaatttctcggctctgtaatacttacattttcaacgtttaaaattatcgggaaaatcccgaatttatcaaaattagaataccataaatacaataataatggttgatttaaaataaactcccttattggcaaagctaataagggagtattttatttatgttgaatattcctacttcaattttactataacatcattggtaaacattgtcgggttccagttatttctactgcaaacaaatttatatagatcgtacgcttgctgcatatttgcaactcctcccagctcataggtttcatttttagcctgattgaaataaaccgctgttctcataattccctttcttgtttaataaaaataaatccctcatattgaggtgtttattaaagcaaatataacttgaagcttttatataaagcaagtagattctgctataaattgctccttactgcataataacgaatatttttaatctagctgtatctatccctatataataaaaatgcccctaaaaagttaagcacttattaggggcaatccaattgctatgggttctttattgttcctcacagattacaaaaccgcgatatcgggcattatttatgcatcgtttattctgtaatttagaagtttttctgcaatttcactgtaaatatcggtgatattgacaatgcattttcaatttaaaccgaaattcactggtcaatttcaaccgaaattaggtggtcaatttgaccgttttttacatctaatatgtctgtacaactaatctttagatattacaatattattatttttcattaaaaaccgatacccaaatggtaatgccagatatttcaaaatatcaggacgagcaaaaacgacatgataaaagtgtacaacttttaacgtcttgatatcatcattataatcatctgtaataagataccagccactctctttctgaggtgaatcatacctaattccttctatatcttttccttcataaacaccacttgaaataacaactgattgattgaaatttggaaaaagaggaataagattttgttgccgacatatttcactttgttctctcacaaccaaaattgctgtatcacatcctcgattaaaatcgctaccatcagagttggcttcatatatatcataataattatcttcatccattctaaattgtaaaagccatgagtaatatcctatattctgattttctgaaataatagcattgctatccacgatataatctatcagatatttaattacctctacataattttcaggttcatttttatcgatttttaatctaatttctttacttatataagaatcaaatccttttgttttaatgtcaagattatctaccacatatatttgaattcctttgtattttatcatttttcttaattgaatatttctaaaaaaagggtatcttattgataccctcattaaatagctcttaaatagccgattttctattaatatcaaatatatcaatatctttttcctgaaatatatcttctaatgccgatgctccatttttcattttatattcaagttctttatctgaaattggaatacagaaaagccaatgaacagttttcgtttcaagtttcaatggttttaatttatcctgccacaaaaagggtgatataaacataatatgtttcatctcagaagtttcaaaatacatttcaataattctcataaatactgaacctggctgacattcccaaccatttttagtaatataaaaacctgctgtagaaataatattgttcaactcgttggattctttgtatccgccaatcaaaagctctattcgaatatctttaaagctattatcattcatttcaattttattggggtaatcagaaacacctatggtaccacaaatttttattgttggataaagaggatcatcacatgtaaaaatatcaataaaattcttttcgtcttcgtcataataacgatcaatcattttattaataccaacaatacttgtaatataattagaaagttttttattttcttcagaaatttcttgagacataattttttttttatataatatattttacttaatacacacttaatagtaatagccattagaagcaacgacagcaatcaatttcattaatattatttttgttcatacttatgacttctatttgctgattttgattctggttgataatttttaggatttctatattctcttaaaaactcttcttttgttatttctcctctcatatattttccatgtaatgttctatactcctgccctggtaggtgtcccatatcccatgatctaggttttactgctttattccatataagttcttcgttagtatttggatcaaaaacttttccgtccttttttgccgtttcccaaacctcttcaacttgtccctttgcataggatggtctacttttgctataaggcttttttaatattcctttttcagcagctaaaagctttaaagcatcatccccattttttgttactaccaataagggtaatgctgcgagattcatagccttgttatccgaagaagaaagcataatgcccaaaccttcccaaaatccaaaagggtctccagcacctccaacatattgaattggtctgtcatttcttacacctatcagactttcagccattgcattagcttttgtctggaaattccatccgttgagaccttgaagtatagcattgtacatggtgtaggaattaaaaagataattacttcccagattccaattactgctgtttccttttccattaaaggtaatgccgggtatgtcctctttaaaagtttcatttccactcatgaatcctccaagaccatcaacactacctccaccgccgaaatattgttgtaagcctgctatttctgacttatcggtatatagatagccaatacctgtagtggtatacattcccgtaggatctgaataaaatacaggattattcgatgcgaaatgataaggggtagaatcgtcataaaactcggaaagcatatccattcctgaaaaccttcccagttccggcatataatttctccaatccattgcatacattccggattcggtctgcatttctacgccgttatacttatactggtaagaattgtttcctgccaaagcattatacccttcatgctttaatccaaacggataataattgttttcttcaagaacttctgcgctgccattggtatttctaaaatagcttaaacgcacattccccagatggtctttatagctgtaaatatacttatttttcgcaaaatcgaaatagccttcagccgttgggataaactgtagtgaagtcgtgctttgtgaggtttcatactggaagccgttaaggtaatctaccgtttttgcggcagaggcttttctcagtttggtaccgtctgctgtgtaggtataggaaatgttaccctgcgctgtagtcattacactggcaaggttcagcaggttgtactggatagctgaaatgcccttgtcctgctggctggtcatgtttccgtttgcatcatacccaatcgtgtagcccaaagcattataaccggaagcattattggcaactcctgccggaaggctgatgctggcaagcctgttgctcaggttgctgttttcataattgtacaccagatcgtcgatcttctcggcaatggtaccggaagaaggtctggaaaaccttttcagggttttgatatttccattgatatcgtagctgatgttttcattgaagtaattattggacgttaccgaattgtaaggttcagaataaatcccctgcaaaagcctgttcagagcatcgtaggtataattgtatcttctgtaaaccccgtcagtagatgtcttccagtttacttcggcaatgtttccgttgtatttagcggacgcggaggtattcagcggatcagtatatttcacttcgtacccgaacagctttccgttgagaccggaaggatcattaatcctggtcatccatccacggatgttgtaggtgtagtcgatgctttgcaggttgtttccaacttttttgttggaaagctgggatagctcattgtatgtattttcggacagcagttcctgaggctggctgtttacctggtgccattgctttttcaacctgttctggctgtcgtattcataaatctgggttattattgtttcggtatctgaagaaagccttttgtgatagacttttgttttctgaggtgtcccggaaaaatcgagttcagattctgttttggtatatccacccaaatgattgacggattggctgcctattgctcttgctttttcgtcgtaccagatatagcttttcgtccagctgtcgttttcaatgttttttacatacgaagcagtgggtgcattttttgtatttaagctctgccccatatcatcaccgataataggtttgccaaatatctgcgaaggtcttgcaggactgtctgcaggataggtatcgtagtagtttaccgataataccgtctctatgagattgaaataattattggtgtaataaatctgcataccgtttctggtaaagcctgtatcctgtttcgattcagtaattactaaacttcctgcctgattttgcatatccgtcctatctccaccggctaaaatccctgtatagatggctcttccaaactggtcgtattttgtgatcagccacttgcttttggcgtgcagattggcatcttgcgtcataataagtctgtctgctttatcatacacaaaatattcccatccttttccgggaagcttcctctctacctgtcttcctttgggatcatatttatactgatagcagaggttgtcgagtatggtttgagaaagtggctggttcactgccagtggaggaattatatatacaagctggttatatttgttatatacatagtacgtgtctgagctttgggtgctgctgagtacttttcttaccagaaccgtctgcccttttccgtttataaactctacggatatatttccgtcttcatcggttaccgagttttttctaagaataccctgggtataattgccttcagatgtgagtatatcttttgttgcattgtttaaccatgatgtttctacagtgtatttcttcacatcggcagccgtatttacttcatcagtaaaactaatgctgtgccctgcataatctgctccgggttttgtttgtgaaagcaatttgtttcggggtgaattttccggcataatcaacgagtaatagtatgcatccgagccgtatgtttgcggagcattgcttttcgggtctgcatataccgctccgttttgtgttcccgattgcggaatagggagatagttttttagctgtcttccaaaattatcatattctaccggagaaacaatatcttttccaccgggtgaacctttgatgcttattacctgcttaggtcttcctaaaccgtcagtatattctatgatttcagactttttgctgcagtcttcattcagacaattcttagtgtaaatgtaattttctgttgtagtaggtgtttgtgcataagaagctgctgctacaaacatgacagttaacagatttaaaaaagatttcattattagtagtgtttgtagttatattgattttccttaacaatggtgccattgctgtcttttacgaattgtattctgcctgcagaatcatacgtataactgatttttattccattcgcaaatatagaattcgtaattcctatgagaggatcataagtactcgcagagatagaatatggctttagagcaggatcgagccttaggtttttcaaagcagtaagaagcagatcctcactggcagatccgtctgcatctgcgttggacgctgcgatagcagctgtaatcaccggtaatgaagatatatcactgtattttgctccgacaatctgtgcaatgggaagagtcttgtaatagccccatatagtaacagtgcttataccggatttgtctgtagtctgtactggatttcctctatcgtcatacacatcaaatgtgatctgggtttcaggattctgcgcaagatctgtagcgataacagcggttggataataatgatttgtactgccaaaaacagttttgcttgtggaaagaatattaccattatctcttattacggtttccaatggtactgaaatcatgttggcatttattaatctggtatcagatatgtcctgtgcatactttatcgttgtttcactgacatgaccgtcttgtgtggtaatctttgaaagaactttctgaaaattattctggctgaaggttgattcattttttgtaacatagtcagaatttccaatttttacggtatttatttctttttgaaacgacacataagaaggaataaattcataagtgccgcttgtctgtgtctgagcatttggaatttctgtaaaattataagtaaattcagtattttctaacaattgattctgcgaattatacattttcttctgagttagaacaccttgagaagtcagattaaaatgtgtttgtgtaaatcctacacttccatattgagagtattcataaggcgtattgtaataataatcaatatatccgttattctgattttctgaaacctcagtttctctgacgtttttataaattacataaggataagttgaatcgttaatcaaatatcctgtagaagaaataggatcattaaaggaattgtatttatattctatttgcttttttatttcattatcatcgtagtaggtaattttttttattcttgctccataaaaaacaggtttataatttttgtagggtttgggtagcgattttagctcgacaatactaaaatcgcctgctccgtcccagttactgattttaattttatatactccgggaacaagcctataatatttggtatatgtattacttgtacaatgatatggcaaattatcggtttgcataactacattgtttgaattggtcacagaaaaaccaaaagatacgggatgcccgacaacttcataattttctccaataagtccttgaaccgttaccggatatgaagttccgggatttccatgtacggtaaatgtatatagtctggtattattggtatcaaatgctatactatctgtaatatcgtaatactgattaagcggatctgaatatacattggcattctcaaaatccacagttgaataatcttcaaacacttcattcgcctcataatcatactttactcttcctccggttggaaagtatatttcattaagaactctgtatacatacttctgtggattgttataggtaacgggagacgggcaaggctggtaagcatatagggaaccggtactgttattggcaccatataaagtatctgtaccatctccatagccaaaagcggtattttctatctgattattgtttgaatcaaacttttttaatgatcccaagccaacaaaattatctattgcgaacttaaattttgagacgaccttatctgctgcagttaataaagaaatagaattaattgtgtaatactctttattttgattatcattatccgcattttcattatagtcatactcgaattttaatttaccttgtgatgtggtaatggtattaagcttgttgactttatactttagtgcgaccgagccataaggatttaaagtgttttttgttttaatatcataggagtacgttatcagtatcctgttattggtgtctgtaactgttgttggcagataggcagtcctctgattctttaagtctgctaaaggattattttgaaaagaggttatattataagcgttgaaattatatatcaatcctttatcatcggtaattttaaaagaattgatgataagcttggtagaagactgatcgcggacaaattcaaacttcagtttactcgcatttaaatcgtaaagttttaattctcccgtagaaacatctttataaatttggaacacaccgttaaatccgggaatactataataaaatcgatccgaattctgtttcgttaaattagaaatttcggtaaattcattattgttggcaccgctctctttggagataattgcacccttaaacattgtccagcctaatcctacttcagttggagccatgcccgtgcgagaattataaaggtgatatgacagcgaaagagtaacagcagcttttttatcgtctgattctaaagtatataatggaacattgacagatggaactcctaatgcagcagatgccttatattttacatagctttgaattgaggacgatgtaggctcaggattaatcaggtcttgagcatatattttgtttgtagctataaaagtaaaaatagctataaacggaacaaaaaatttcttcatcatgtttattttttaatcaatttggcgttcgccgttttatcattggtttttaccaccaccagatacgctccctgaatcagcggttgggtattgatcctggtgatcttgttttttgtttttaccgtttctagctttcttccgcccatatcgtataccgcgatctcggcttcaaacgcgccttctctcaagccctcaaacccaagctccacgtacacataatctgttaccgggttcgggtagatcctgatatcctgtttttcgatcagttggtcaacctgtttgtcacccagctttacgatcttccagttttctttgcctaactcctctgcgctggttcctgcgagtacaatcgatccgtcacggttcagcttaatatcagataaccgttcctctttttttcgggattctccctttacgtgctttctccactgctcatttccgttctggtcgagatacagcatccagaaagtctcatcatcattttcaatcctgccttctgcctgtgtgtaaccgcccagcagaatccctttagacttcccgcctccgtcttcctgcttcccggcaatgacactcattcccatcagaacatcccggtttttaaaattgtaggatttctgccactgctcatttccgcttaaatcaatagccaccaaccataaatcggttccttcttcaataccaacggatttatttcccgatctttccgatctggattctcctccgatcaggtaccctgttgaagtcagcgccagtgttcttagatgatcgtcgccttttcctccgaaattcttttcccactggatttgccctgtattactgagctttacaatataatagtctccctcaccataattttctgtcttttttgatcctcctgcattacttctggaatagactcccaataaagcacctccatccttagtgggaatcatcttttccacttcatccaatccttttccgcctaaaatcaattgggataattcttttccgtttttgtctaattttaccactaaaacatctttggagccgtagcctttcggtgagttctgcacattgccaacaacaaagaatccgaggtcagtcgtctgaattaccgcccgcgcttcttcatccgcagtactgcctatggttttctgccataattcatcaccaaactcattgattctgatgagccaaaaatcagatccgcctttggaatcatcttttttatcaaaaccttttgaagaactggacgtagcaagtactgcaaaccctccatcctgggtgctgaccgtggaagccgcaaaatcgtggttgttacccgagaaatatttttcccacacagtttctccctgctgattcagtttcatcagacgaagatcgtaaccgttgttctgcttttgattgccaaatgatggttgactgttgtcggaatggatgctgctgcctgtaattaaatactgttggtcgatggtcggggtaatttgcgagaggaactcctgcgtggaagacgggatgtctctctgccagaccacttcctgggcagaagaaaaacctcccaggagtacgcacaagagaagtgcgcgtgaataatcttttttcattgtgaatatcaaattttaagttgctaatatatttttaattgtgtgttgtttgcaatccgtaaaaaacccatattttgggtttggatttagccgaattatcttagcctgaccggttgtttactttcattttgattgttttaaatgttattttttttcttggtgacaaagatatattcgcagaacggcagaacgtgtcgtattttattgaaatgcatttcaactgcaaaaaaaatctttagataataataagaaaggcgcggagcaagagtcaatttgtacaagaggtaccgctaagaacccagaccaaaaaagactccgcccgcgccagatataggtacacgggcgtaagtctatcattttttggtcagtaagaagattagcggttttcttgtaccaaaacgatagcttacgcttgtttcgttaaaattatgcttcaaatgtaagtaatatttcttaaaacagaatcaccgtatttttacggtaatttcgggtttaaaaatcacctgaccggaaaaaaagccggcttgcatagaaagagaatactttttacatttgtaattatggcagaagtaaaacttacaaaacaggacaaaataatcaagcgaaacgaccgtattcgcagacgcttcgcttattataccgatacgaaacattacgacagtgattatgcactaggattactggaagaggaatatataggatcactggaacgagataccatctggcttattatcagaaaaaccggacattataaaaacctgtagtgatgaaaaaactaataatccttttattatttccaattattttttattctcagacttctttaaccgatgacgatatttacgctgctgcggggaatgaatacgaaacattattaactaatattggaatagatcgtgaaggtgggtttgcaatcaatcattttttacataaaattgggtttaccccagatgaaaaatttacgcagcacggcgaaaattttaaacagaaatatgtacaacaaattgtatcaggaaacgcaaagccggcagtaatatgggtaaattatttaaacaggaaagttaaaggatatgatttcccaattactcagaaagtagatatttcaggcgatactgagaacatcattaaattttatgtaaacttttggagttctgctattaactttaaagataccaagccgggtgagacggtgacgactcgttttttgtccgatgtcgctgccctctcagtaggaaccaacggacagtcaaaaatagtcgttaccacggcaaaagattattataagtaattacattttaacaataaaatcagactgaatattaacctgcttttctggcaggttttcttttgcagtatatttcacaatcggcttggcatccactttaatcattttggaacagtccgcctttgtatcgtcggtaatcgttgcttcatattcgtaaaccgttacaataacattgttatgatccaaatcgtcctcgtcagccaccttttttaattcactgaattttgtgccgctcaatccttccagtgcggcatccactttttcattaagatcaaaaaaagccagtgccagttcctgatctatactccccgtataactttcagcataattctcacaaattacacgcacacggacaatgcctttcccctctttaattccatttcccatgtctgaccaatcgaaacgcataaaagcgattaaaacagcgggtttgggaaccatgacaatattttccctttcaatctgcccgcggtctttatcaatatagatcaattcctccacctgagcttccagatggtcggatatttctttaaataccattccttttatactcatgagattatttttttaagttctgacagtatcatccgatccagtgttttttcgagtgcttttgagtcaccaataaattttctctgcgggatctcaatatgtgtttttgtggtgagggcgagccatttccagtattcttttcctgattccttatattttgcccagaagaaccttcgcatctttggagtgatcagaatttttcccccttcattatggattttggcataatggttatggttccctattcccacgaccacgcgcgattcagatacctgtatttttttaatttccctgcgcgtattcccggaacgtaccattgtggttctcgctccgggatagctgctttttttccatttctggaaaggaacatccacaaagccgccaacgttaaaatttcgtttaaagaaattcaccgtggtaatggcggctttctgcggaatggttcttttaaaattcctgtattttgcccggagcctgtcgaactcctgagcattattctctctacgcattggctctgatttctatatcggcgatcatttcattaaatatctgttccagtacttttctgatctcctgtgggttttctttgatgttggtggtcttaatggtcaattccttaacaaaggactgaatattgaaaatcattttttttccgtccccgccggttccggcaccggacagggaatttttggctttgtcctttttacctttcgcacttcctccggactgcgcatccaaagccgcggcaggttttccacccggtggcaccaagccggaaggcggcggaataccggcagctgcagttattttgttttgggtggtgatcttaacggcttttttaaccggcttttccagttctttattccatccttcataagctcctttcatcgcattaggaattaaaatcccggtttcttttataacattaaaacctttggagagtgctgattttattttatcggtatcaagggtaaaaatacccaccagtaaatcgcctacacctcctaaaatattaactgcaatatcccggatgcttttaaaaacagaatgcacatttccggtaaatgcgtttaatactctttgaatgacggtcatttttttctcccatgcatataaggcgttgataattccgaaaatagcatccaccgcttttagtatgaccccaatagctgcccccagtatttcaccggcatactgaactgccggagcaataagctcccaaacccgcgtcagcaatcctgtgacgttggaaagaagctgcgacgcatttcctgactcatacattgccgtaatgttttccattaaagctttccggacatcattaaatgcagtttcaaccccgccgataattttaaaaagcaattccagaagcggggttaaaaacctgattaccccggcgatgccttccattgccaatttcgcaaagttggtttctcccgaaagctttggaaagccactattccggatcgcgtcaatcacgggctgaaaagcttccaccacctctgaaagggcatttttaaccggctcggtgtagttcatcatctccgagaggaacccgaaaaggtaatttccggcatccaatattcctatgatcagcggacggaatgtttctccggttttaagcttaaactgtgttaaagcattttcctgcctgttgatcgcggattgcatcgagttcatggcggcaggcaagcccccctcaaaagtgttttttaattcttttgaaaatttgggcagaaaatcctccgccataattttaccactgtctaacatttgattaaactgtgcctgcgtcattcccatagcacgggcagcaatccccaacgcacccggaatcctttcccccaactgtcccctgagttcctcggcagaaactttccctttggaagccatttgcgagagtgctaaaaatgccccttcgctctgctccgccgagaggttcatcaccgaagcggcaattccgaccgcttcgaaaatatcccgtgtcgcctgtccttcgagggcagtccctttgagggatcctgttaaagtctgaaatcccttgtaagaagattccatattaaggttaaggtcttttatcgttgtatcaagaaatgccatgttttttgccccctgctgaccggaggcaaagacaatggcattttccattccctcgaatttggaagtaatcccggtgatctcttttccgaagttgattaccgcacccaccgacagggcggcaagaatggcaatcccggcactctttgcatactgcgcgagaccgctaaaagtactctgtccggtatttcttaacctcccgatcccgctgttggcagtattgacggcattgtcaagcccccttgtttcatttcgtgcgcggctgatcccgttggaaaacgagcggtcgatcagatccagtgcatattgtaaaccgttcataacaggtaataaaaatgtttgttgtgccggtggtattccggattattttcttatttttatccacgatttataacaagtgaaattataatccttcgcttattatctcattcattcatttcttcaactcattaagagtataaacctcccttgcggaggttttatttttgtcctaccagcagccctctgcggacagtatcgggatcactgatccactcatatgccgtaacccggacagattcggtggttactttcagggctccgtccgtataaaagcgtaagaaaaccgtctgcggaactgctgtcgaatcactccagtagacttcgtcgggactgatgagcgtttcgcggatctgcgtaaaaagcatatcatcggactgcacggtcatggcatcaatccatacagggaggttctccgctgtgatgacccttgccattccggttttgtcaatatggctttttatggtgaccgctttttcggggtaggtattttttctgacttttgcccattctgaaagcccgtaatccgtaatgcccaaatcgtccacatcaataggtttggtatcttgcggcagcttttttaaatagctttgggcgcgggtaaagacctgatcactgtctccccagttgatatcaaagccctgtttctgcattcgttcccagccgtcaggatcaatttgtatggcaccgtcaaaacttgtaatttccccgtcgtaatcatcgaaaacgtcctcagcgtcggtgcggcatttccaatgatgcgggggcaggaatttccatgaatccggatcccttttgtcaaagactttcccgtccagactccgacaaatcaccgtcgttccgtcatcgataatggcgttcaatctccagtaaggcgcaatttctacatcgtccatcatttccagatatctggcagccatattggaggtggcgttggcatgatcccattccgttttcagatacaattccttatagttcggaaatactgattttgccttatttctgaaatcattaaaactttttacttccggatccttcagcatctcattaagctcatagacttccgcctgcgttttgtctgctccgaaccggtggatgttattcatccaagccctcatccggcggtggtcggtactgtcaaaatcaaagttcattttcccgaatccctgctttattgcctctaacaaaggggtatgcgatgccttaaattcgttgtagctccaattgatggttccggggttttcatacagctgccgcaaaaatttttcttccgcaggtgttatatccctattaaaaggggtctctgactccgcctcacaacctgaaatagtgctgtgaggcgcattaaaatttacatagtgattcttagggactggtggcgacagctcaccgctttgggtgccatcggaaacttctccgacaatttccacatccagctcggtttcgatctgttcctttttgattttgtaccctaaatctttaactcccttaaaaatttccagtctttccttcggcgttaatttttcattgtcattccatatacaggtgtcgttttcgtcaaacggataacccagcccgcggagccacggcaggacatcatcattgataaaaaacatcacaaaggtttcatcatccatggtgatgagcttttgagtgccgttaatgatttccccggttttagcccggcttccggtgtcttttgccgtttcggaatttccgtcaaaaagattggcaagctcctcgttacaggcttttcttttttcattaaatacattaaagctgtcccggctgttggactccttaatgtcgatttccaccccttcggggaatcttgcccatcctgcagaacccaaatcttttaaccatttatccacttccttttttacgcgtggatccgttgaagccacctttgccgtacgcatcggaattccgaacatctcctcgaactcatcccagttttgccatgaatgctttttaaaaatccataacgggattgccttgtttaaaagtcctatggaatgctcatgatgtacccatagcgtccattttttaaggtttccttcgctaaagttttcgccctgcagatcataaggattaataagcagctcggtggtttccggtacgatatgatcccggtacacaaaagacagttttttaatgaatccattttcgtccagttccttcgggtacatgagcgtataagaaaaatatatactgtcaagggtatatttgatcaggtttttaaaccatagtttttggatcagcctggttttttcttcgttaacttccccgtctttatcgacaatggcaaccgatttattggaaaccctgagcttacgggtttcgctgcgcccgtaaataaaaggatcgtccaacacttcctccataatgtcaataagcattttacggcgtggaagcatgggatctattgccgccgcctttgccagtttccagtctttgatttccttattatataaggtacgctgacgtttgatcgcatccaccatccgagtgaccgctctttcgtagtctttatctttaccgccaccgaaggcattgtgtaaaaaatcggtgaccgcctgtattttaaatttcatttgtatcgtatgtaaagggtaattaatagcgctctgaatatttcgggttgcttccgaattcgatcacctggcttccggtttccccgccactttctccttcgtcgggtttctccggcaaatccggcgaaatatcccctttggctacggctttgagccagtctttggcggcgttgtaacggatgatcctcagttcaggaatgacatccgcggcggcattggcatggaggtggtaaatggcaatatccaccatatacataataataagcgcgttcctgtcggctccggcagcggaaaagatttctactacattataccgctgtctcaaatagctttccatttctgcctgagcggcaagctcggctcgatgctgaacatcttctttccgttggatgataatctgtttaatccagttccggatctgtacttcgtagtcggtttctgttaaaaaagacattgttataattcttaataagcgttatcgttgtttctttcatgttttcctataccgagagcgtcttcgttccagtattccgaatcagaaacaacaaactgatccagaaagaaccacgcgccttcgtcggcatccggagcgtcgtccgcggtattatatcccggttctattccctttacctgtaaattcccttccaccatatccggatcgttttcttcctctacattgtagaccacgtttccggaggagtattccggctccattcttaccatacgggtgtatttattgggtttttgcctttcgtcggtcaggacactaagcgggtatttgtattttttgcaggcgcgtctgagggctttctttaccggtcgggtgtaaaattgtttttccatataccagatgatccctaccccggggggcaggtttttctcaactttgatcatccactcgaaaacgtcctccagttcacagcggcgcgtgaaccttttaatgcagtagcgtttgaacttatcctgtccccaaaccgatacggctttaaaatccgaggtctggctgttttcaaaactcggatcaaaatacccgatgatgatatccattttggagaggtgcggaagtttggcaaaacggaaatatttgtttttaaagattttcccttcaatatccgtttcgtgaaagaattcctgcttggcaagaacagttcccgccttggcaattttcctcaggagttcctgtaatgaataccgctgccaccaggcaggttttccgttttcgatggcttttactttggaatggtaaatgccctctcttttcttcgctccgggtttggtatctcccacgatattggcaaggattgaattatgatgaatacggttcccgcccatcgcgaaacgcgcccctttgatactgagggcaaaatacatggctcctaaaatctttttcaccactttatccacccttttcggattgtggacaatgtcgtcatcgtccacgtcatccaccacaccgtaattgggacgtttttcgttttcccttgccccgcgcggggactggtcacgaccaaaagccagaaaacggattccttcttttgtggtaaaatccccgtcctcccatgacccgaaattatactgctccccaaaatcgtgggcaaagagtttattatactgcagctgtgcctgaaggtcggataaaaggttacacgcgtcgtcctcatttttccccatcaaaagcattcctgttaattgcttatgagcgataagccacatcggtataatgatcgtcaggtgaacagatttggcgtgttcccgcgcccattcggcaaccccgaaaaagttcggatcggcaaggcaggcattggcaaagtcaatatgaaaatccgcgcagtcagcatcggcgtataattcaaaataggttttaacaaaaaaattataatcggttaatgcccttttaattcgtaatttttgtgtttcctcggtatcattaaaggcaacggcggcactgttctgaacctgtgaacagaactccagccattcgttataatcccttttcgtgatggtgattgccgacattacttttccccgattttatagtccacgtattttttttgcaaaaggttgatctcctttgccagttctgcgttttgagtaaaggcgtatgtcgtgaaatccttaaatacattaatgatctggctgatggttacctttttattcgacagcttttcaatgctgttggcaatctgaatgatatcattgggtttgcttttgggatcttcactcagggcgtgcgcctttttatacaggttttcgatgatctttcgggcggtaactgttgatgcgcttttaagcaaatcccattcgccctcggttttccatttacccagcgttttttctgtgacgtgaatgatttctgcgatttctttctgtgttttgtccgtttccagaaacaagtcctgagctatagcatatttctcgtcattcgtcagctttttcttttcattcatccgtaggtatttaatttttaattcggtcggatgcaacctcaatttccggtttcattccttctatataggaagcaaaattgctttatataagggctttaccgaagctggctgttaggggctgtatgaaaatatataaccactatatgaaaatattcagccgctaaccggcagcttttttcggggtgtttttcagccaatctttgccttatcaaaatcaaagaaatgtctaaaaagccctttcattatgaactcagaaatcaggtttccggcagtgccgaaatcaggatgtatgggtacatcggaaaatatgatgagttcgactataaaaggttccaacaggttttcagggatgcactgcaaaagaatagtgatttaaccataagaatgcactgcgggggcggttctgtgtatgaggggctcgccatttatgacctgatcctgaattcagaaggacataccaaagtcattgtggaagggatggcagcatccatgggcggagtgatcgcccttgccggtgccgaaatcgagatgaacgataacgcattctttatgatgcacgcggtaaccgcaggatgtttcggaaataaaaatgattttaaaaacgggattcagcagattgaaaactgcgaggaaaggctcgggaaaatctttggtgaaagaacaaaagcagatgaaaagaccattaaaaactggttcgattccgggcaggatcactggctgagttccgataagtgcttagaactgggaatttgtgaccgggtgattaagcctaccaaaaaaagaaaaactgggcaggaagccgaaaatatcacaaacaaaactccggaagaagccttcgaatgctttaacctgtatcctgaaccccctgaggacaataatattaatcaacatactgaaatgaaaaaggaagcaattttcgccgctttagctgcggcaggattggcgggaaaattaaccgcttcatcttcggataaagaatttgagcagcatctggaagaactgttcagcaaggcaaaaagaaccgatacgcttgaaaatgaactaaaggaatttaaggaaacacaggcggaagttttgatttccggggctttgaaatccggtaagatcacggtttcggaaagggacgaatggatcaaggatgccacccaaaattatgccctcgtagcaaaatcactcgaaagaatgtccggcaaaccggatcccaatgcggggttagaaagacaaaaatctgtggtggacggagacaggcacgaactgttcaacggacgtgaaaaatggacgttctccgactggcaggaaaaagacccgaaaggtctggaaaggcttaatgaggaagccggagaagaatttgaaaaattgtttaacgccgaatttgaagactaaaaaatggcagaattaatagacgggttatacctgaacaaatttgtagctccccaattactgaaagagttcagaaactataacgataaatttctggtggcactggagccggcaccggaaggagcgaaaacagcggacggtcttcgccagaataaactcatcaataatgtcggtttttatgtcaataatacggctccgtttacggcaaagtccatgagcggtaaaaacagcattattccctgggacaaactggataccgacccgacaaaggtcaacgatgccgagatcagggcattggcatttgacaagagatcggaagtccgcgtaaagcattcacaagggtttagaatcggagttcgtgattatgttttaaacaaactggcaccggctcatcatgtttcaggagccatgccggtattaagaaccacaggagccgtattcaacggaagaaaaaggctgacgtttcaggatctgatcaatttttacaatgaaattgaaatattgaaccttattgatgacgatacctcggagtcgcctaatttctggaatatgatcctgaacccggaacaccgctcagaccttaaaattgataaagcgggaactgctaaccacagggataatctggaatttgacaaagacaccggggagtttaaaaggttctataaaataaggatgtgggaaaataacgcggctcccctgtattcgccgacaggggaactgaaggcaaggggatccattaaagaagatggtgaccagtatgcctctacctttttctattcacccaatacggtttggcatttggagaagctcaaaatcctttacaaaccggaatatcaggataccaccaatgcagatccggagtctgaattcaggctgcagggatacgggctttgtgataaaaagcaggagtacggttttggagccatcatttctgataacggttaaaaacactcaccatgaaattatctattaaagccctggaagttgcggctacacagatcgggaaacaggaaaacccgcccggatccaactggggcgaaccggttaaaagctacctctccagtgtggggctcggatttgccgccccgtggtgcatggctttcgtgtattggtgtttccgacaggcttccgaaacaatgaatgttaataatacggcaatcaaaacaggcggtgtcttagccgcctggaatcaagccgctcaaaaaataaaatcctctaatcccgccatcggatccgtgtttattatggattttggcaaagggcaagggcataccggtctcgttgaaaatttcgacaaagaatttatttataccatagaaggaaataccaatgacgccggtagccgtgaggggattaaagtatgcagaaaaaaacgcctgcgaacgacgattaaaggttatttaaactactaaaatgaaatctttttttaacgctatatctattttattttgtctggcgctgttggtttcctgtggaagcaggaaaccactgccgccggaaacagtcaccgacacccgggtggtaaaacaggtcatccgggatacggtgctggaggttcaggcagattctacgtattaccatgcgtggatcgaatgcattaacggcaagccggttctaagggaaccgaagccggagaacaaagaaaaaagagctgaaagccaagaccacagcaaggcgttacagaagcctgacgttatcctggacgaaagcggaaagctgaccgttgaatgccgtaaagaagcagaacagctcaaagcacagcttacggcttattacgaatcacggctaaaagaacgtatccaaccggttgagatcaaaaagccctttgcatggtatcataaaatattgatgctggcaggcgggatctttcttctcctgattgggtctgtcatcattattaccattaaaaattcactccatgtctgataaaaagaaatttcaggaaaaagccaatgcgctttttgaaaaataccaggaggctaataaaatttttatttcagaaaacggacagtgtttttttgaagaaaaggcggctaaggattaccacggtttaagagggtttgaaagtgagccggaagtcttttttcgtgaagggtttgaggacgaggacgattcggatctgcaggcggctcttcataattctgaactggcacgaaaagtcttagaaggaattatcgaagatgtggcggcggtttgtgatcttgaccgggactacgaaccggcaaatgctgacacggacgaaactgttacggctgttatctcccttcgtgaaaaatacgctgaaaaaaaccgcctgctgaccgaggcaaacgccgaactggaggaactttcaaatgttgcggcggaaaacgaaaatctgaaacaacaactggaagccgccaatcaacagttggaagctttgaataaaacaacaatccaaaaaaacaggaaagatgcgtcccagactgatcgtacaaaagcttaacggcgggcttggtagaaggaatccctccgccgacatggtaaccggcagcgtgatgaatgccgttgccacttccgaaatggtactgggaaatatctacaccctgaaaaatattcaggaggtcgaagctttggggattagtgaggaatatgaccagaccaataaggtactcgtatatgaaaggttacggaggttctttgttcacaacccatccataacggtgtattttatgcccgtggctcaaggcgtaaccctgacgcagatggtggataaagacaatcaatatttagccagattactccgtgataaagccggagaaatcgttcaggcttgtgtttccttaaacccggataagagccattcaccgattatcgaaacgggacttgataaggacagtatcgatgccatttataaagcgcaggctctggcggatgccgaatgggcaaaagaccgctactgtgaaatttatattgaaggcagaagtttttcaggaacatcggcggcagctcttaatctgagaacgctcttaagcgaatgcccggacatttccgtggtgatcggtgccgattacgaggtttccagccgggacgacctctataaaggctatgccgcggtggaggattatgcagccatggtttctaaggcggatgtttcacagaacgcgggggaacagatcaatgattttaacttaacccatgtggatgagaaaacctttatcattccgggactcagttccggtaacaaactgagcgattattcggatacggatctggataatctcgatgatagagggtacatctattttgcgcccattgttaacctgggcgggatttcttccaccgcgggaatctatatcaacgatacccatacctgtgctaaaattacctcggattttgcttatggggaaaataacaggacgatcaaaaaggcgatcaagctcgccaaggcagcattaaccccgaaagtaaagggacgtatatacgtcgatgaaaacaccgggtttatggctcctgaaacggtgaaggacttagaaaccattaccaaggtttcacttgatccgatggtggcagccggagatatcagcggcggtgtggatgcctacatcaacccgcagcaaaacgtactggctacaagtgaatttatcgtgctgctgacctttattccggtggctatcggaagaaggattaccctgaaagtgggtttcagaaaccctttaaatactcaataaaaatggtgactcagacaagaatcaacggaaaatacaggaattacggaaatgtccgtattaccgctttgggggcgaccttcatgggcgttaccaaaatagaatacaaaagaaccgacgccattgatccggtaaaggtcgtgggaaccaccaaatcggtaggatatacacagggcgatgaaatctgcgaaggaagcatcgggcttttgagtgaaacggtagacgcgattcaggcaaaactgcccaaaggaaaaaccctgcaggacattccgcctttcccgatcacggtttcctatgtggatgatgccgggttacaggtttgtcatgtcctgtacggctgtaagttcaaagagaacggaagatcagcggaggcaggaagcaatgatgccctggtcgtagaaagcccgctatacattcatgatatagactttgcagcctgatgaaccggcaggaattaagggacaaatgccgtgaaatgggcatcccctttacatcaaaagacaccaacaatcaattaactgaaaaaataagacttaaagaaatgaaaaacgaaacacaggaaggtcatatcaccgccgaacagatcgcagagtggaagaaaaagtttaaaaccgataagctccacaagctgacggtaaaagataaagacggaaatcctattgtcggctatctgaaaccacccggaagggaaatcaaagccaccgccctttccatgtattcgcagaataaaatactggaatgtggggaatttatccgggataactgctggcttggcggtgatgaacgactgaaaatgagcggcgacattgccgatacggcggcaatacaggcttcgggaatcattaagtttttagaagcggaactgggggaagtttagggcttccgatcaataaggaagccggatttgacttcatccgaaaagtaagtgccctgataagctatcattttaaaattcctttcccggaggaactggacgaccagaccttctggaataaatgggaacagctgaaatgggtactgttttttgagaacaaaagagctaacgcaaaagagggagaaaatgtcgagttataatattaatgttaaagaactgatcaaacagcactttccatttacgcttggttttgccactcagaccgtcgcagatgcactttttaacggttttgatgatatacaggtattaccaactaataatgatcttgccaaagtttccgtcatgggaacaccggtctgggattttatagacctgaagccttcttatattgaaggaaccggtgaacgcttcggcgggtattcttttccactggaaacaaccattgaacccataagacctaaaaagatcgtggaaaccgatattttcgggcgtgacggaaatgtagaggaactcatcgcactggatgactggcaattgaccatcagaggactaattatcaattatgaaagcaccgattacccggaacagcagatgaaggaattgcaacgggtttgtgaacttaaaacgtcattacttgaatgcgaaggaactctgttaacgatgctcggtatacattatatgagcattcacaggctgaccttaacgccgtcgatcggctactcgcatattcaggcttttgaattggaggcaaaaagtaaaaccccttttatcatctccccgtaatggtaccctgtgttgaaatactaatcggaacattaaagttcacggcagccacggaaattactattaaaaaaagctggcgaacctttaccgatacggcaaccattaaacttccgaaagccatctattattatgacggtaacggcattttaaaaccggtggaacacctcggcaattttataaaagtcggtgataaggtagaaatcagactgggctacaaccggcagctgtttacggagtttaccggctatgtggcacggtcaccaaggattaatattccctatgaactgatttgcgaggatgaaatgtggcagcttaaaagaaaagaaacaagcgtgtccattgaaaacgcgacggtacagcagattattcaggcggtagctccggggtatgagttggattgtattgatgaagtatacggagatttttcgatgaaacagaccaccgccgtcaaggtttttaatgagcttcaggaaaaagcaggtatttatacctttttcagggacggacgtctggtgtgtggtaaaatctattcggacgaaaaagtttcaaaggctcagccggtgtttgaatacggcgagaatattattgatcacaacctgcaatatattttcccggatgaagcaaaggtaaaactgtatgcaaaatctaaaaataaggatggcagctatacacaggttgaagttggagaagacggaggagacattgaacattgggaagtgccagcaatggatatgaaagaaaaagaactaaaagcaatggctgaaaaccgtcttaaaagtctcaaaagatttggtggatataaaggaaccatcacctcttttggctggtcacgagtagaacatggacaagtggtacaggtacgggataaaaaatatgaagaaagaaatactaaaaacttcgtggatgaagtggagatcacgatgagcgcaaccggtggttacagaagaattattgacataggaaaaacgtacagggatggagagtttaaaaaaattacttaataggtttccggtggttttagatacggcaaaagttgtgagtatagccaatgataaatgccatgttataagccttacaacgggtaaagattttagaaaatgttcaattaattcagtcattgagaataaggttaataaactattgatttacccaaaaataaacagtgttgtcactatcggaatttattctaccaataataaggctgtcgttctttccgtcagcgaggttgaaaagatttatttcaggaacgacaaatcagaattcactttcgatggttccggttttcagttcaaccgggacggtgaaaatttaaaagaagtacttaacgggtttcaggacgggtttggaaaactctgtgatgagctggcaaaagtggtggtttctatcggggtaacccctgacgttccggcaatcatgcagattaaaaatgatattgtcaacaccaataaacaggcattaaacaaaattttaacctaaaaattatgaatgatatcctactgaatgacgacaacgatatttccattgtaaacggtgattttcatattggagaatccggacagcaggaaattgaaagcctactcattgcctttaaaggggaatttaaaaacaccccgcttctgggagcggaactgcccagaatgctcaaggcaaggaacacccgccaggggattacccgtgaggtcaacgaacagctaaaatatgacggtttcacccgtattgactttaaaattgaagatgcagaaaatttcaccataaacgcccaaagagatgccccttaataaaacccggctcatccaaaggcttattacgatgttaaataagccatcaacgacaggtaatgtagaaaccgcggctcaggaactggcggacgccatcgaggaatatgtaaaaagcggaaccgtgaccggaatttgcggcggtgccggaagtcctttaactcagggaaaagtaacgtaatgaaaacaattgttttaactcatcagactattctggacatctcaatacaatacacgggaaccgtagaaaactgctttgccatcgccgtggctaatggcttttcagtttcggacgtattatctgcgggattacccgttgaaattccggaagatgtatttaaaaatacggatgtcctgaattattatcatgccaagaacatacagcctgcaacaggctgggcaactgaacaggacagcgaaataccaacattaaaagggatcggatatatgcagattgcaaacggttttaaagtaagctaatatgaacagtacacttcaggaactcatcggacttatcctttcgctaaaagaggcaaacccttttttacaggggctgacctcccattctaaaacagcggtctggcgcaatatgctggaaacggtggcttttatgatttttaattttcaggaagccctcagattgcacatgaaagaaattgacgataaaatcgctgcccagaaagttcccaatgaaaaatggtaccgcgaacaggcgctccggttccagtatggttttgagctggatccgctttcctacaccggagagtttctcccgacctatgaagacggaaacggtaatatcattactgcgacccggcaggagatcgaagattcaaaaattataaaatatgcttcggttaccgccaatatcagcggaaacggggtgaagaaaatatccatgaaaattgccggcgaaaatatggacgaggtgatttcagatgaaaaagcccttgcttttaaatcgtatatcgaaagaatacaggcgaccggagacaatattgtagtcgtgaatttcctgccggatattcttttattaaaatacaggatatgtttcgatcccttaatcctgcatccggacggcatgagcattctgacggcagagtatcctgttaaaatcgccattgagaattttttaaaaaacctgccatttaacggtgagttttctgtcgaagctctggaaaatgttattcaggaggtgaacggcgtaagagacctgcaaaaattagaggtctcgagccaatggatcgaaccgggaaccggatatggattattccaacccgttgagatcagcaggattcccaaatcagggcggtttaaaattgaagactggagcggaattgaatacattaattatcagcctgctgactaatgaaagatgaattatttaacatcaattataagcagttagccctctggtggctgcctgctttcaggagaaaaccggtaacccttcattttttgtggtgcctgatttttcctcttgaagctttatacattgagtttctgaaaagaagaaaacagaatttaattaaaatgaatttcaattaccagaaattctccatggaaagaaggcttaatgatgcttttgatccaatggaaagaaggatccggattgtaaatgccgtacagtatgaagggatttatttgtataccgaagcagaggacaatctctatttttccaaaacccggtggctctacggggatgaaaatcctctgtacctgcgaacagaagcggaattatattcagagtacgattttatcgtcaggattcccggtacgccaattaatatgcaccagctcagagccgagattgacttttacaaattaataagcaaacgctacagcatagaaatcataccataatgagaattaatatccaatttcttcagaccggcggtgttcccctcaccaacgatttaatggacgtgcttcaggaagcatacaccatcttcaatgttctgggggatgtagcgggacatttgacaattctctcgggttgtacgctcacaggacagagcgtaagccccggtattgtggtgatcaacggggacgtcctctattttgagggcgggctggtcaatacttcggtgtacattcatacggcgcagatcactaaaacgttccaggatcagaccgataaaatactcattgaaaagaaaacggtaaaattcggactgtccgctccgggcaatatgtggaactggggcgactttaaaagactggacacgttaaaagtcatgatggaaaaaatcagtgccgccgctactcaagccgacctgaacgatattaaaacaaggcttgacaaagtagagctcaagaccgctcccattgttaacgggggaattgcatggttctggcgtaagcccctttctgagattccggcgggnnnnnnnnnnnnnnnnnnnnnnnnnnnnnnnnnnnnnnnnnnnnnnnnnnnnnnnnnnnnnnnnnnnnnnnnnnnnnnnnnnnnnnnnnnnnnnnnnnnngattatgtgattcctttttacggagctaccaacagcgggcagactgccgtgggaaatgacctttccgttatcaaatggaacgggaaagccccggacggattctatgaccatacctacgggatcaattccgggggaaagggaatgcccatggatgtcctgaaccgcggtgtcattgtcgattttatagaacctgattttcaataatatttttacaattcatggcaacacctttaaatacacttttaagctggtttgaaaccggggattttcccacacaggcacaatttcaggcttcgtggtcttcattctggcataaggatgagcccatccccatgtcgcaggttagcgggcttgccgggctttttgaacagacggcaagcgcacaagccctcagcagccatctcaatgattcgaatgcgcacgccggataccttgcgaaactggacgcttcgaacctgaccgccgcccatgtcaatgcatggaaaaacaggctgggcgtggatgaaattcccgccaatacagccctggtggatatgggacagagccagtcggtatacaataaagagcagatcaattccctttgtatgctgctggaaaactatgtgaacagcgacgggaaaatcatgtccggaatgattgaggcgttaggtttaaccgagcttattacggtaacacagacttcgttagcttctttcatggctgatcatgccagttatacctatgaaaaaaatgatatcattgccattcctgacggagcgggaaattattctttatacatctataaaggaggcagcaaaacctcggctgataattatattccgactggattaacgaatctcactattgggatggttcagggcttacaggcagctttagacagcaaaatgaataagccgaccgcaagcggaaattattacgcgaggtattttctcgggcaggtttcatgggctgccatcaatcctgcctccagttaccttttgttctggaatggaaatgattttacaggatcccgcatttatacagacggtacgaaattcggcatcggtacaacggcacctgctgaaatgctgcatctcagcaatggaaggatccggagtaaagcactggtttttgatgaaaatacggaaaccctgccgtatcaaatcacgcactcaaacaggcgttattatggctcggatttaaccggagcagccagaatgtttatgtacagggattacgcagactataaagcactttgggaaggctttaccgatgcacagaaaaatgaaataaaaaccattgcaaacggtggctggacgaccaacaccatgagtgtagccattataaccccgccaattgcggcgaaacaggatatagcacagtggtttgtaatgaggggtgccaatctgaatctaaatcccaccagttttgccgtgtatctggtagatgcaggaggtacagaatttcaggttcccaacagtcaggtacaattatataccagcggtttagacctttccttctggtataattttaaagatctcgctttgggaacctataaggttaagctctggaacggcgcagcttcttatacaaccggggcaagcgtgaccattactctggtttctaatgtaaccccgattgatttttcagggatgacgtgggagaaagcgtcaaccactccggcacaggtcaacaacaccattaatgcctccggtaccacggtaagccattatccaaattcaggcaatgcaccatatactcaatttgaaacggttgtatgtgcagccaagtcgggtacaataatttcggataatgaaaatttttatttgaaagcttctgttacggtaggttcaggacgtttaaccagctgggggaatatcatcggagtcggtctgtcttccaatcctctgactttggtaaatagcagtcaggcattttctaaagtaaaacaaaataatgactccagttcagtgaaatatggctgggcggatatatcatcatctgtgatatcgggaggcttcaatgtaggacaattccaatccataccctacgaagtgatgattatgagaaaccaaggcatttataccattatcgtttccaccggttcagtatcggcaacttttgtaaaaagtggttcaaacggagctttgtctttgttgtattatggattcagtgcggcagatattgacgggattacgcctcccacggcgtgtacttccagtgtaagttttattgaaggttataaattttaataaataagatcatgaatactgaattaataataacgcctgaagtccgggcagtattagacgccatacaaaacaccggtaaatcatggcatgaaatgatgcttccggatcatccgatgtatccacagtttgcaagaaaattagtggtaacaggttttaatacacccgatatggagggcgaggaagaccgtatttacgtcaatgtccgccagtacctgattataaaggacggcaatatcatccataaacggttaaaaatgcccgactggatgatccatgaaggaaatgtggaacaggtcatgggaaaggacggttttttaaaaggcatctacaggacaacggatgatgacgggctggttaccgaagaaaaagaggcaatactaaaagctccgtctgtgcagtatatccgttttctgatcaaaacaaaagccgcccatctggtggatgttttacagcagtttatggggctgtatacagaactctttgaaaaacaaattaatgaaatataacaatgaaagaattgataacagaacctgtggttgcctttctaggagcccttttgacggggctggcaggatttatattcgggaagagaaaactcagggcggaagttgccggtatgaatgccgacaatgaaggaaaggaaattgaaaacgccgataaactggtgaaactatacaaggaagctttagacgatctgggaatccgctacgaagccaaattcagggaattttcggatttatcggataaaaaagtactgatgcttcaggagcagatcgattttcagaaacagatcaacgaacagctgagagcggaaaataatctgttaaaggcagaaaatacgatactcaaaacaaaattaaaagaaaatgggattaccataaccttataaaaacaaagaacatggcagattttaaatacaaagagcagcatgcggtcatcataaagacagacagcgaaaaagagcaaaaagaattgttcgacaaactaaagaaaatgggatttaaaaatttaaaagttgtatccgtataaaatctttaggttccgttggtcaattaatctaaaaatagaaatcaaatgaaaattgaagtaaaacacacctgcgaaaattttaattcgttcagatcagaaaaagtgaaaagtttatttaacgctgaaaacggtcacacatggcagcataccgccgaacttccgattgaggaggaaggatggcagatcgggcttattgttggcgcttcaggaagtggcaaaacgtcaataggcagccaaatttgggaaaatgggattgtaaaccttgccgaaggctggaaccctgacctgccgatcattgaggacattgcgcccggctcagatatgaatactgtaacgagtgcattgtccgccgttggattgggggacgttccggcatggctccgcccttttaaggttcttagtaacggcgaacagttccgcgcggggcttgcacgtcttatttgtgaagccccggacaaagtggtgattgatgaatttacctctgtcgtggacaggcagattgccaaaattggagcctccgccttttccaaagcctggcggaaaacaaaaggaaaacaaattgtactcttatcatgccattatgatattgttgaatggctgcagccggactgggtctatgacacccggacaggtgaagtaaaaaaaaagcctcaaaacgaccgcctgttaaactcgacatttggaaggtcaacggaagttactggaagttttttaaaccgcattattatttagatttaaagcatccgccctgtgccgaatattttatcggaaccgtagacggagaattggtgtgccacgttgcggtttgcccaaattttcaaataaaaggatacagggcgacgcgcttggtggtaatgcctgaatggcagggtgcgggagtcggaactgcctttttaaatgaaatcatgcagtatcatctggagggtaaaggaaggtgtaaccacaaatatccgacctattttcatacctcacacccgcagctttgcggatacctcagacattccccaaaatggaaacaggtgtcggcaaaacttaccggagacaacaaagcacgaagtattaaatcaatgcacgaaacgggcaaaggttttgacgggggcaaaaagaaaacaacaggaggattcggggggcatttcagggcagtacagggttttaaatatattggaaatgaaaaaatttaaagtttttatatcaggtcagaagttctttgccgaagaagttttcaggctttgtcaaaaattagacattgaaattgtaggggtttcttgccctttagatgatcagtatatcggaaaggctgcccgctgttggaatattcccattattcctgccggcagtttaaacgccagcaatatgccggagtgcgatttgggcattaccgcccattcttttgactatatcggaaagaaaacaaggtatattccgcgtttgggatggctgggatatcatccctctttactcccaagacatcgcgggcgcagctctattgaatgggcaatcagaatgaaggaaccaattaccggagggacggtattctggctcaatgcggggattgacagaggggacattgcctatcaggattggtgctggattcctcctgaatactttttaagccctcaaaaatccgctgcaagactctggcgcgatacattgctccccatgggagtgaaactctttgaatcagcccttaatgacattttaaatggcgtgatcaaacgaactccgcaggacaaaaggttcagtacattcgaacccgacaccaatgtcaaagatatataccgaccggatctattaatgatagaatatgaagacagccaccaataagtggctgcttttttatatctttgactttatacttttctcggcagtttggaaaggggctttgcgctttttggtattgttgattgtagaaatgaatttttagataacaatcgttttaaatttaaccacgaaagccataaaggaaatctgtcattttgaatgaaattttgcgaagcattatgcaatgaagaatctcttaaaatgcagttatttgagatttttcgactccactttgttgcgctcaaaatgacagtgttgcagattaaacgacagtgtttttaaacacttaagtcacataagattttaaataatttaaggatttggtcagtaaaaaaaatttcattcaaaaatatattgaaaaccaatgaaaagaagaatgtaaaaatttacggcgaacaactcaagttattggattgcgattcagtttattcttttatgaatttttcataataaattttatccttcgtctggattttcaggtaataaacaccttttgcaaaatcttcgacttttacagatttttgattatcggcttttgtaatgaatcttcctaagttatcataaacttccaaggataaaacatcactttccgaagctacattcagaatatttttaataggattcgggaaaatggcaatattgtttttctttaccagttccgaagtgtttaaaacgttattgtaaagacctccgaaatttaaaattccaaatccaatctgatcggtatgattcggataaagagaagcgttctgtcttaatttatccctcattaaatctctgttcaaggtaggaaaagcctgaataagacaggcgactcctcccgcagcaatgggagtggcaatggatgttccgttaactgaaatggttgaattattattgataacacttgttgcagcggttcctcttgcactcgcatcgggttttacaacacccgcagaattcggaccgaaagatgagaacgtggaagaagctcctgaagaatctacggctccgatggtaaagacttttgcattatccgccggagttaaaatgtaatgccaagtctgagctcctgaatttcctgcggcaaataatgtgaaaattcctttgttaacagctatttcggctcctcttgcaataaaggaagtggttccgttcatattggcataagtgtagttgtatttcggatcatcaaaagtagcatagcccagagaagttgtaatcatatccactcctttacggtcggcttcttctgcagcttcaatccagtacagttcttcttcaggaatttcgattgcagcattttcacttcggtacagataaaaatcggcatccggtgcggaacctacaaaagtatcctgaacatatcctcccattgcacccaaaatagcagaaccgtgattattgagtgaagtattgtaaatgtctgttcctttagccacaaaatcatatccgcctttgatgtgtccgttcgtccataatcttgaataggcagaacctgtatttacgtaaggaaatccagaatcaattaccgcaatgataactccggttcctgtgtagcctgctaaatggagggggcgaagattgatctggtcgatctgtgcggagccagaaccatagtcaaaagtggttaaatttttattcgcagggttgattggatcgtcccatttattctgatggctcatttttgttcctccggaagaattttttgcaaaactttctacagactgtacataattctgcgcctgaagcgtggcaatctgagccggagttgcattcacggcgacaccattcagccattttgaataatcggttacggtgaaccctaaattctgaatattggtaatgtaagtcggttctatcggagcatcctgatcattgagtgcaattcctaacgaagtacggcggttaagggatttttgggataattcagacaacggatttgcgtaaaaagcagccttgttcggtttgtccttaaaaaatacaaaaacaagcgatgtctgtgcaaaactgacagagtaacctgctaaaagacaaaaaagtaaagtttttttcatgtatttattttgtataaagataaaacaaaatcaataaaatttttgaagggattttaaattccttatttttacagaaatatttatttatgaaaaagattcaaatggttgacttacaaagtcagtattacaaaataaagaatgaagtagataatgcagttttaaatgtaatggattcagcggctttcattaacggtcctgaagtaaagtctttccagaatgaattagagtcttatttggacgtaaaacacgttattccttgtgcaaacggtacagatgcacttcagattgctttaatgggtcttgatctgaaggagggtgatgagatcattacggcagattttacttttgcggcaacggtggaggttattcatttgcttaaacttaaatcgattttagtggatgtggattatgatacttttaccatttcaacggaggcgattaaaaaagccattactccaaaaacaaaagcgattattcccgtacatattttcgggcagtgcgcgaatatggaagagattttaaaaattgctgaagagcataatttatatgtaattgaagacaatgcacaggcaatcggttctgaattcactttttcggacggaactgtaaaaaaagcaggaaccatgtctacggttggaacgacttctttctttccatctaaaaatttaggatgttacggagacggtggagcaattttcacgaataatgatgatctggcgcaccgtttaagaggaattgtaaaccacggaatgtaccaaagatattatcatgatgaggtaggtgtaaactcaagattagacagtgttcaggctgctattttgagaaaaaaacttccgcatctggataattataatgaagcgagaggaagagcagcagattattatgatgaagcttttgccggacatgaacatattttaacaccaaaaagagcggaatattctactcacgttttccaccagtatactttaagaattctgaacggaaagcgtaatgatttgcaaaaattcttagctgaaaaggaaattccggcaatgatctattatccggtagctttaagaaagcaaaaagcctattttcaggaaagtaacgacgctgattttgtaaataccgataaattattagatcaggtaatttctcttcccatgcatacggaactggatgatgagcaactgaagtatattacggatgcggtgttggagtttatggggaaatgagataaatggaaaagaaggtttttaaatataaatttgtttattggatcgctattttaactaatattattttttgtattgcatttggatttggtctttacaataaaataataagtaatttgctttttgatatatatacagcattgatattcataattgaaatactttcttttcaatcattgattttattagttaagaagaataaaatatcagttttaactttttcgatatcactaattttgatttttttaattatcacttttggtatttctaaaaaaatctttttgggagattttggaaataacgatatggattatattatgactccaattgtttactcaatattgttcgggctgcagttcttaataataaaatatagattcaaaattgattatcttcagttagaaattaatcaaataggagaaaatcaagattaaaaaataattaaatggcaatactcgtaacaggaggtttaggatatatcggctcgcatacagttgttgagcttctgaatagcaattttgaggttgttattgtggatgatttatcgcattccgagagatttatattaaaaaatattgaggaaattacagggaaaaaacctgttttttatcctttcgatctaaaaagaaaagaacttttaacgcaggtttttgatgctcatgaaattgacggatgtatcaactttgcggcattcaaagcggtgggcgaaagtcaggtaaaacctgttgattactacgagaacaatttgttttcgttaatcaatattctgcaggaatttaaagaaagaggaatctcaaactttattttcagctcttcctgtacggtttacggacaggcggatgaaatgccgatccacgaaaatactccgttaaaaatgcctgaaagcgtttacggaaagacaaagcagatgggagaggagatcctgattgactttgcaaaagcatatcaccgcaaaatttctttattaagatatttcaatccgatcggagcacatccttcagcaaaaataggggagttagctattggagttccgaataatttagtaccttacgtgatgcaaaccgcggcaggaatccgtgaaaaactaaatgtttggggaaatgattatcctaccgaagacggaacggcagttcgtgattacatttatattgtagatttggctaaagcccatgttgcagcattgaaaaaattaatgacagacgattctgatggtgctgtggttgatatttttaatttaggaacaggaaaaggttcatcggttctggaagtggtaaaggcttttgaaacagcgaataatgtagaggttccttaccagatctgtgacagaagagaaggagatattacaattgcatatgcaaatgtagataaagcccaaaaagagcttaactggaagtctgaaacatctttagaagaagcattacggacagtttggcaatggcaaaaatatttagaaacaagaaacacttaacaatttgtacaaaaaagaagacatttatatgaaaacacaaagaataggcatcacgttttcgtcattcgatctgcttcacgcaggacatattaaaatgcttgaagaagcaaaaaccgtatgtgactaccttatagtaggtttgcagattgatccctctcatgatcgtccaaccaaaaataaaccgactcagaccatcgtagaaagatatattcagttaaaagcagtaaatgctgttgatgagatcattccatattacacggaggaagatcttctggatattttaaaatcttttgtaattgatgtaagaattatcggggacgattatttagacagagatttcaccggaaaaaaatactgcgaagaaaaaggaattgagattttttacaataaaagagatcacaggttttcttccagcgatttaagaaaaagaatttacgaagctgaacttcagaaactggaaagagcagaagctgcaaaataaaaaaatcccgaatttaatttcgggattttctgtttgtatgaaaggcggattacattggtcctccttgctgatcgtctccggttgcattggagttgatgtcttttttacgtttcggctgctctactttttcgtttccttgcttgaatctgtaagttaacgaaactgcaaactgtcttggctgccactgcatataagaatctctgctgaatccaggtccgtaagatgtagattgcattgctctggtattgaaaatatcctgaatattgaatgaaatcgttccgtctcctttccagattgtttttgaagctccaaaattcaaagcatacatatcttttctgtcaacactctgtgttttttgtcctcctctgtagaaaccctgaagctgaaagcttagtgttttatcgattttaatagtggaagtaagtcttgctcttacggctaatccacttccttcaaaagaaagaggttcacttattaaagccggatcaaagaaaacacctttcgtgttatatccgaaaatatctacgtttccaaggaattttagccattttgtagtgtcccagttgaagttaagatctaaaccgaatctgtcatcacttccaatatttacaggcttggtatggaaaactgttgtcggaacattattaattaattcctgtttgttgtatgttacaatctttacatcatcagtctgatgtctgaaatacaatgttggattgatcgtaaatttactttttgaaatgctgtatcctaactcgtaagaatctacataagaaggattcagatcgatatttccgtcaaaaatattctgattatcgctatagcttggattaggaatcaaaaagaaagatctcggtctgtctattctgcgggaatagtttaacaaaaactgattgtcttttgcgatttcataactcaaaaacacacttgggaaaagattattgtagttcttctttgttttctgtgtatcgcccgacatattcagataatcaatatcaatagtagaatactcatttctcaaacctaactgataacctaaattaccaattttgcttttgaactgaacataccctgcattgaacatttcttcatactttgcattgtatgtgtaatcatcaagataaagcatgaatggcaatgtagatgttttctgcattacaaggttctgatagttgttgttattaacatctattctgtaacccgcttctaatttcgagttttcacctatcggaagttcataatctgctttaccgattaatgttttattctttgttttttgatcaatattattttctaaatcaaaaaagctgttttgagtctggtaaatataacttccattattggagcgattactctgtaaactcaatgataaggataaattatgtcccttatcgttaaatttatgatctaatccaaaatctccctgaaacgcaaggttatcattggtaccgacacttgttctgtttcttgttgtaatcgcgttgctgaaagaataattggtataatctatatttccggtattggttccgtcaaaagttcttacggttcccgaagcattaattgaagttttgtcggtaagatctacaacaagacctccggttgcattgtaattatcatttttgcttttagaaatcgattcgttatgcgtttctctgaaatctcctgtagaaagataagcattgtttctctgggtattcttagattctctgtaaccgccgccgccattaagaaaccaagtgaatcttccttttctccagctcaaatttgtatttaaattggtttgaggtaaatatcccagagtacctaaaacacttccgttaaagcctgttttcttatttttcttaagaataatatttaagatacctgctgttccgcttgcctcaaattttgatgaagggttggtaattacttcaattttttcaatctgatctgccggaatactctgcaaagcattagctccatcatcaatccccagaagggcagaaggttttccgttgattaaaaatttcacattagaacttcctctcatagaaaccgttccgtctgtgtctacagaaaccgaaggaacgttggaaaggacatcctgaagatttccacctttacttacaatatcctgagacggatcatacgttcttttatccagttccaccttgtaaggcttcgtagcctgagcggtgatcacaactccctgaatgtctccagtcttcagattggtagagcttttttcagggtcgattgataaagcaccgatgtttcctgctgcagtaatttgtttgttaactacacttttctggtaatcgattgcttcaatagtaatatcgtaagctcccggagcaagatcaagcttgtactgacctttttcgtcggtaagcgtagcatcactgaactgtttgtttgccttgttactgaaggtaacagaagcgtaaggaacgggctggttgtttttgctgaccaccgacccggaaataccgaccttctcctgtgcaaaagccaatgccgctgccgaaagtacaaaagtaagccctaaggttttctttgtaaaaatgttaatgatttccgtctgattcataaggtattttttgtgtaaaatcgtgaaagattttacttaatattgtgaaattgttaatctgtttaaatttcagaatactaagtctaatttattatttgtaaggtatatgtcgaattaaaaagccaaatgttagttatagaattgttaaaaaaaagttaatatgattattattttatatttttagaattcagccagtcctgataagctttagcattaatagcgtgttgctctgcactcgctgtaaacttgtggtatccgaatctcgcaggatcggcacacataaaaatataatcgttcttttctgcatttaacacagcatccacagaatttttatctactacgcaaataggtcccggaggaattcctttattagcatacgtgttgtatggcgatggagtagacagatgcttataaaaaacccttttgatctgctccttaaaatttgtctgcttattgattgcataaattacagttggatcagactgaagtttcattccttttttataacggttaagatataatcccgcaatcgttttctgttcgtccttttttcctcccgattccttgtacacaatagaagctaaagcataaatctggtctctcgttaaaccggattgctgttctttagattttctttcgctattccagaattcattgtactgatcatcaaattttttgaaaaattctttcggagttaccgtccagaaaaaattgtacgtatcgataaagaaatacttttttaaatcttccgcattgttatatcctttttcggcagcaatcgaattgaaatcattcacaaattgtaaagaatcaagttctgttttttttgttactttaccaatcatctgataaacatccccaaaatcaccaattctgaagctgttttcactctgatttcctgctttgatcatattaaccaaattcgcattccccaaacctttttggaaatgataacgtcccggtttgaaatacttgtcgagatccttttctttcgcaacagcttcaaaagcttctttattatcaacatatttcgccgcagaatcaaggatttgtttaaaattcgcttggtgaggaatcaaaacatatccgtcttttttgatgttgttgccgtagtattttctataaaatttaaatccaaaaaatccacctgctacaaaaacaagcagaatgatgataagaatagctttcttcatttaaatggtgattaaaagttttgcttttttaaataaggtctattttacctctaaaaacctgctttgcaggaccttcgagccaaatattctgaaaagtgtctccgttttttttagcatatactttcagatttccgcccaaagttttaacttttacagagattagatggttattttgaagaaaagttaaagccgaagctgtaactcccgttccgcaactgtaggtttcatcctcaacgcctcgttcataggttcttacgaaaatctcatcatccgaaattttttccataaaattcacattgatgcctttttccttataattttcagaatttctgataccgtttccttctgcaaaaacgttgtagttaacgatatcttccacatatttcacgtaatgcggcgaacccgtatccatcaccgtatcctctccgtcattggagatcgtatgtacatcgctcatttttaactttacgattccgttgtggatttcggcaatatgttccccgtcaatagccgtgaatttacaactgccttcaaaaatatcaaggaaaaaagcaaaagctacggaacatctcgctccgtttccgcaaaagctcttagaaccgtctgagttataataatctacttcaaaatcatatcctttcgctgtgtttattttgataagtccgtctgcaccgatcccgaaacggcggtcacaaagcttctgaatattttcaatggaaagatcatcccattctccggaacgattgtctatcattacaaaatcgtttcctgtaccctgatatttataaaattccatatttcttaatagaatgtttgttttaaaaattgaaactgcaaaattactataattaaaacgaaaacgaacagtgttagctgtccgtttccttatttataatggttttatctgaatccgcctccgcttctcgttggctgaggagaagttggctgcggttgaggagtcgaagttcccgaactgtttctgaatcctccgctgtttgaattcatattgcttcctgagttatttctgaacccgctgtttgaattgctgttcccagaattatttcggaaacctccgttgttctgaggtcgtggagttgttgtattttgctgtggatttctgaatccgttattcggtctctggtttgtattctgtccgttgttcggtctgaaacttccgttcgaacttccgtcgtttacaccgcctctgaaaccgttattaggtcttgccgaagtcgttccgttcgatcccgatcttctttcaacatatacttttcttctggagttattataattctggtaataataaggcatcccgttatcataataatacgtgtagtcgtttctgtaataatatccgtcatttccccaatatccgccgtttccgtaatatccctgaggtgcataataatatccgttgtcataataaggatctccgtaattattggcataaggatccgaatatatcgcacaagatgttaaacttgccattgtaattaagctgaatgctattttaaataaatttttcatgtttttaaatgtactttttttctttataactttttttccaactggcgtatccctggatcgccataaatgtaaataccaaatattgaaccgaagtgattccgagttccttataaatcatcatcggaatacagataaaatctccaatgatccagaaaatccagttctctatgcgccttttcgccataaaccacatccctacaagaaaaatcgatgtcgtaatcacatccagccagtttccccagtccaaatgatccaaacctaaatccacaccttttatggaaaacttattgtcaatataaggcttgaaataatacactaccgttactaagattaaacttaatacgaaaagtaaaattccgtacagccattcttttttggatgcccagcttacttccacatgaacgttatcttgggaacttttttcccacagaatccatccgtaaacgctcattacagtataataaacattaatcatacagtctccgagcaacccgaaattaaaaagaatatacacataaattaaagttgaaacaattcctgtaggataaacccaaatattttttttaatggaaaaataaacacttaaaattccgaataccgtagccgaaaattccagcaaaatctgcgtagcagagtagatttcataaggttttatgaaaagatcatatacattcatgcggtcaaaagtaaataaaaaaacacttactttgcaatgatttaaatattatgaaaatcagaattttaagtttcagaatataaaattaacacggaaaaattattaataaacgttaatgtttctaaattttttatattttcgtaaatctttaataaataataaaatatgtctaaaatttggaccaaaaaaccgatgagtgctttcgaaaatgatatgaaaagcagtcagctcaaaagagtactcggtaaatggagtcttacagctatcggaatcggggctattattggtggaggaattttcgtacttacaggtaccggagcgtattatcatgcgggacctgcattggctctttccttcattattgccggaattgcttgtgtatttgcagcattgtgttactcagaatttgcatctattctgcctgttgaaggttcagcgtatgcctatgcgtacggaactgtaggtgaaatatttgcatggatcatcggttggggactcatcctcgagtatgcgatgggatctatgacagtagccgtttcctggtcgggatattttaataagttgttaaaaatgttcggtcttcatcttccggattaccttacctcagatccagcaagttattcaggagaaggtttttcaatgaatttaccggcattccttatcgtaatttttgtaatttctatccttatcaaaggaactaaagaagcggctaaagcaaataaccttatcgtaatcatgaaggtttctgcggttcttttcgtgattattgcaggagcattcttcattaatgcagataactggaatcctttcattcctgctgctacaatggtaaaagaaggagaaaatcttaaagaagcgtatggtattcaggggattatttccggagcggcggcaattttcttcgcgtatgtaggtttcgatgccgtttctacacaggctggagaagcgatcaacccgaaaaaagatgttccgtttgcgatcatcgtttcacttttggtttgtacaggattatatattttggtatctcttgttttaacagggatgatgcattactcagacttcaatccacaaggaaaatatccagacgcaattaaagcacctgtagcgtatgcattcgaaattgcaggacagggttgggctggatacatcatcacgattgcagcaactgtaggtttaatttccgtattgatggtaatgatcatgggacaatcgagaattttcctgggaatgtctaaagacggtcttattcctaaaatgttcagcgatgttcatccggtaagaaaaacaccggctaaaagtttaatgcttttaggaatcattatcgctactgttgcagcgtttacgccgatcagtaaactggcagatatgacgagtttcggtactttattcgcatttacaatggtttgtgtagcggtttggatcttaagaaaaaaagaaccgaatatgccaagaacatttaaagttcctgcgcttcctgtaatcgcaacattaggaatctgcatcaacctttatctgatctggaacttaagccacgaagcaaaatacctttccatgggttggttagcgcttggtgtagttatttactttacttacagtttaagaaacagtaaacttcacaaagtgggttatggcgaaacgttcaaagcagagcaggagcctttagaaaaaactgatttagattaaaattttataaatagatcaaataaaatccacagaattctgtggattttttatttttgtgagtatgaaaaagcttttaccatttttactgtcattctcaggaatttttacattttctcagcagatcgaaagttcgaagactattttaaacgataaaatcagcatcagagccattgaaatctacgataacaaagtctggtacagcggaacggattctaagtttggttatgttgatttaaaagattctggcaatcagaaacagattaaattatcggaaaagaaattgcagttccgtactttgggacaggataaaaaggctttttatgccatcaatatcgaaagtcccgctgaattttttaagatcgataaaaaaagcttgaaatatgaagtagtatttagagatactgtgaaaacggctttttatgatgcgcttcattttgtgaatgataaactggcttatactttcagtgatgcagataaggacagtaaattaaaacttgccaaatttgataacggaaaatggagtatgcttaaaaatgatgtcgtgctgaatgagggagaagcagcttttgcagcaagcaataccaatatttcatccaccaaaaactatttatggattgcaacaggagggaaagcttcaagaattttaaaattaaattttaagaataatcagtttaaaatcatcaagactccggttattcagggagaatcttctcagggaatctattccatcgatttctttgacgatacattcgggattgcggttggtggagattacacaaaacaggaagctaatatcaacaatatcgcaaccaccaacgacggcggagaaacttggcaaattcaggcttccggacaaaatgcaggatatacaacctgcgtgaaaattaaaccaaattccaaaggaagagagattatttctgtcggagatcgacatatcagttattcttcggatttcggaaaaacatggaagaaaatttcggatgaaaaaaatctgtatgtttgtgaatgggtagatcagaatactgttgtttttgcagggaaagaccgaattttaaaaatgaaaattaattaaccagtttagtaaaattaaactgttgataagaaaaaattatgctgaatatcatcaaccaactttttgaaatagaaaaaaaatccaatgatcagaatctatcgatttttgaaagaaattttgaaagaatcaatcatgaactggaagaaatgggctatgtgatcaataatccggtaggagaaatttacgattccagagatacttctattgaggcaaatattgtggggaattccttgaagccattcattacaaaagtactgaaacctgtaatttttcaaaaggacggaaacgaattgatattgttgcagaaagggatcgtaatagcggaataaaacatgggaaatatcaattttggaatcgatctcggaacaacgaattcagggatctgtaaatttaccgacggaaaagtggtggtgtataaaaatcctgtaggattcagcgatacgcttccttcgattatagcttacagaaaaggcaggatttttatcggagagaaagcaagagaacttttaaaatcagggaatccggatgttttcggttcattcaaaagaaaaatgggcacagaacacctgtatcagatttcggacattaatgaagagaaaactccggtagaattttctgcaatgattctgaaggaacttttaagttttgttcccgatgaaaaacctcagtcgattgttattacgattccggcttcgtttgatacggttcagtcgaatgcaaccaaaaaagcagggctttccgcgggttttcaacaggttgttttgcttcaggagcctattgcagcgtgtcttgcgtatgcgaatttccaaaatattgaacatacagatgaaaaaaactggctggtttacgatttcggaggcggaacttttgatgttgcattggtgaaaatcaatgaaagagaactcaagatcatcgaccatgaaggaaacaactttttgggtggagtagacctcgatcatttgatgatcgaaaaattatttgttccaaaaattgaagcacttttaaacgaagaacttttgtttaaaaaactgatgtcgaaagaggacaacaattatacaaaattatactacgaacttctttacaaagccgaagaaatcaagaaagagctttctgtaaaagaaaccgtaatttcagaattggaattgaatgatggggatcattatatagattttgaaatttcaagaagtgatttcaatgaagttgttgccgaaaaggttgaagaaacagggatttttattaaaaaattgctggaagagaatcaaaagacagcgaaagacattgaacgaattattttggttggcggaactacgtacattccttacatcagagaatatctgaaggatacttttgggattttagtggataattcaattgatccgacaacgacggtgatggtcggtgcagcttattttgccggaacgaaagaagaaatggtagaagcaagtgaaaaacagaaaatagctattcaaaaaaatcaggatcagaataagatcgatgtaaaattgatttacgagatcaatactcaggacgatgaagaacttttggtaggaatggtggagaattttgaaggatatttcagaattacaagaaaagatggcggttttgatacaggtttaatgagtttcagaaataaattttcagagttcattaaagttttaccgaaacaggcaaataatttcacgctgactatttttgatcataaccaaaatcaggtttttgaaaaaaataatatttccattaatcacggaatttacaatatttcgggacagcctttaccaaacgatatttgtcttgaagtcgatgatgctttcggaggaactttactggaaaaaatatttaagaaaaatgatattctgcctttaagcaaaaccatttataaaacgacatccaaaaatttcaataaagatgccgatgataaactgattatcaatattctggaagggaaatccggaactttgcctgcgagcaatatgagcatcggatatattgagatcaacagcaaagatatgccgattaaccttttgaaaggaatggatattgagctgaaattcagcatgagcgaatcgagggatttgtcggtttccgtgtacatcagttcaatcgattttgagaaaaaggaagtttttaatcctcatacaaagcacattaataaagaaaaatttcaggaagacattgataaagtgatcaatgagatcgaaaatgaattacgttttgtcgaaaatattgatgattctaatgacgaagattttaaaatactggtaaagtttaaaaatatgaaagatgagcttttcagaataaaatttgatctgatcgaagtggaagaagatgaatctacggaaagaatttttcagcttgatgaacgaaaaagaagaacgcttcaggaatacgataaattagtccgttttcgcgatgtaatctacgaaattgaagaatacagagagaataaaagagatatggaaagtatgctggaagaagccacacaaagacagaaagatcaattttataagattgtaaaagatgaaaagatctttttggagtccaatgaaaaagcgatcatcaaaagaaaatctcaggaacttcaaagactgaatactgaaatttactataaacgtgatgaatcatacgtagatctttattatcattataaattccgtgatattgaagagtataaagatcagaagaaaattcagaaacttatagaagctggagataaggcagttgagaacagcaattatcaggaagtgaaatttgtggtttcgagcatgtataacgagctgaaagtaaaacctaaaagtttgtttgatgatcaggatggaaatttaggattgaaataataaaagcactcggaatggagtgctttatttatatttttttaattcttttctaatgacaaaaggtaatccaatggtaagtaatattcctattatgggaacggttttccaggctataattaatccaataataactgcaatacacattactgctaaaaaaacatacaactgaactctttgtaatttataacctaattttttaaacttttctaaagctgaaatattattattctcaaaccgtcgttcgtattgtttttccatttttttgtttgcaatgaaaaaaataataatttccaagataagaactgttataaatatatagatgttgatttttagaagaattactaacagcgcgattggtattgtgtagtagccgataaatgtagcaatccattttagaacattatctttttttctttgttttgcgattttggatctgaaatcgataactgacttcgttattttttcatttgttttttcaagatctttttcgaaatttttcggaaaaaaaggagctccttcaacgatccagtctgcgccgattctcgagttctttttaagtattcttcttaaatcttctgtgtatgcatcaaaatgtccaagagcaactaagatcttttaaagaaagtatcaatgttctgatgctcagaaacatcattgttgatgtttaaaattacatcattaaaatacgaagaatcaatatcggactgcaaagcataaaaatgaggatttattccgtgcttgtactgggcgagaagataactgtaacgtgaactcgacgctaaaatattgaattatatttagttgtccttggcatctatgcatttatccagttcgggaaatttaccgatggtttttccggataaaaacaataggcgcatatggcagagannnnnnnnnnnnnnnnnnnnnnnnnnnnnnnnnnnnnnnnnnnnnnnnnnnnnnnnnnnnnnnnnnnnnnnnnnnnnnnnnnnnnnnnnnnnnnnnnnnngctcataacccgaaggtcgcacgttcgagtcgtgtccccgctactaagataacgcttcggaggcgttcagaaaatacaccgcgggatggagcagtaggtagctcgtcgggctcataacccgaaggtcatcggttcgagtccggttcccgctactattttaaaagagtattgcagatttttgcgatactcttttttatttatgcgagctggcaaatgcttttgtggcttaatttgtgcaggtattgtgatacacttaaatcattatattatgtataaaaaaattctcgcaggtctgggcggagcaatcgcgctgaatcttctgcacgaaaccatcaggaaaaattttgataatgtccccgaaatcaataaagtgggagaagaagctttaaataaaactttggcgaaagctgatgcagaaattacagatcatgataagctgtatgctgcaaccttagccggagatattatcggcaacggaatgtattatgcaaccactgccactacagggtttaatatcgcttccggattggcgatgggaatcggagccattacgcttccgcaaaagatgggtctggatgaaaatcctgtcgctgaaaatactcaaaagaaagtaatgacggtggcttattatcttttcggagctattgttactaaatttatatacgataaaattaaataattttttctgcgaaaatttgccacagaaaactgtggcattttttacatttttttcagggaagaagctttgtgtacggctgattttcctgttttttcgctcatgacttcatattgtggttcatcctctgtcgctcttctctgcttatccataaatacaaagtcttttttatgaatttttgtaatctttccgtgagtttctccgttgctggaattccatctcaccatgtctcctttttttaatgtgctcatttttgtttggatttggttgtgatgtacaattcacttattatgccatattttaaagtttatacgaggaagatttggctgcgcttatttagatcacataagttttgtgagttattttaaaataaagatcacataagagaaaatcaaagattttcaaaaactaatgtgttcttctacgctgtatgttgatcaaataaaactattgcgactttggttcaccatcccaaaaatctgttctaaatatttcatgcaagatttttcatcagaaattgtttgtattaattctaaaacagatttaatatttgtgtctaaaattttgattatcattagtttgtattgatatgtgaattattttgatatgtctattttgtctgttatctttgtaaacttacaagttctaaggaggtaattctgaatttaaacttatctaaatgaaaaggtttaaaagaaaaattccctcacggttcgtgagaacgttaactaaagcaattcttaaaggtttaacatctgaaattgctgaagcgataattaatttcgtttcctccctattggattaggatactaatcattatacaggatagagagattgagacaagaaaacatctctctatccccaataggataagaaggtcttgtccctccttagtcttgtaaattttattttaaaagaagttgttggcttttattctttcaataggaatatggtacattcattttaaacaccgaataaagtctcgttacatcatcctatactggtgtgaatttatatcttgtttgtgtttaaaggtctactataacctctattgtcaaataagaactacaaactcacaccttctttattttatataaaattccacttttgagtttgaagtgaattattcataattatgaaacaatatgacgaaaaagaatttactctaattacacacgatgatatgaaaacatatcaatggttaatcaaagaaaatatcaaacgtaatagagtcaacggtattatatcaaaaattattatatacgcttttatttcggtaataactctcatgggtattcttatggtgacaaaagatattttctttaaaaattatttttttaatccttttgatcaggaagaaagaattaagaatcttgaaaagaaaacagatgaaattagtcgacaaataaaaatggaagatgattacggatctagtaattatgaatcatttgaaaatcaacatataaatgataaagttaaagaacttgaatcgagagtagatgataattaatttagggtagaactaattcccataaaaaatcccgcttaaaaaagcaggattccgtatcatttaattaaaaaataaattattgtgctaactgattgaaaggcgtaagtgcattatcatcagccattgtctgcccgataaaatctttcttctgatttcctttcattctgttggctgcatcatttccgttaaagaaagactcgcttagttttgtggtgatttcagaagggttaaattcaaattttgtatcgccgtccactccaagatatccgttctttcttgtaagattcgtgatgtagttgttgtagttaattaaagtacctctgaacatattattgtggtattccatgcacttcttcgcttttttggaagaattgttcaggatgcagttattcatatttcctctgtacagtctccattccagttctacttttccatattcttttgccagagcggttttaccgttagaaagaatattcggattgctttctttttcactgatctcttttaaatgcttgatcactaatggaacggtattttcgattttgtttttagcttctcctatcgcactgaaatctgctgcaggagaacctttcttttgagcggtagtaatgttaaaaataagtaataatagtacaattaataaattatatcttttcatgagaaatttttaaagcactaaaataaatataatttcccggtttagacaaatacattttaaatttatttaataaaaattaacaattttataacgtaagtggttcattattgttaaaatgatgtttttaaactttttatgaaagtcattttttaagataattcccaaaaattcttatatatttttaatatctttaaggtacacaacacacgatactaaaatcacattttaaggctatgaatcataagattgttgcttttactctattacttaccacgaagttattctgtcagcagcttaccttacagcaatgtatagaaaaaggaaagcagaataatgttgctgtaaaactggcggaacagtctttggaaacaaggcagaaaatagcacagtccggcaaaaacaatattcttcccaaagtcgattttcttggcggatacaactacattggagaacccatcagagtaaatcttcagcaggtaaaagacggaattgtggaaggttcagccagtcagagtgcctattctgccaatgcggcttatcagcagatcacaggaaatccgcttccgcagcaggttcagaatgttatttatcagacttcaaaagatatcattagcgcggtttatcccaattacaatcctgccattgccaaacagagctattttcttgccgggatccttgtaagacagcccatttatctcggaggaaagctgaatgcttccagagaactttcgaaacagcaggtggaaagcgggaaagccaatctggaatctattcagaatctaaattcatataatatttctctgaactatattcagatcatgtatcttaattccatgatcaaaaagcaggagaaaatggcagaagctctggaaagcaatgaaaagtatgcgcaaaatcttctgaaagctgagatcatcccgccttatcttaaaaactggtcagatattgccaaaattcagggcgaaactactcttaaaaatttacggcttgaaaaggaaaatacgttactgactttaaaagatctgatgggaattcctcttgatgaatctttggaaattaacgaagaattaaatgaaaatattgaagtcaccagttttggttcctcagataaaaataccgatctgaaattattacagagtaagaaaaaagaggcacaaaccacgaacgatattacaaaatctctgtctaaacccaatatttttgccattggaaattaccagtttttcagaaatgatcttcctttaatcacgccgccgtggttagtgggagtagaagttcagtggactctttttgatcctgaaaggagatccagaaatcaggcttctgaatctttggtgaaagaggcagatctgttaatagatcagaaacagaaatcggtggatctcgctgtcagaatttctgaaaataaactcatcagcttcaaagagcagaaagaaaccttggatcttgcgagaaaacaggcatatactaccacagaaatggtaagaaaaagaatggaaaacagtctttcttccgtaaaagatgtaaatgatgctctgcagcttcagtatgaggcagagaaattgtattacacgtctctggtggcttatcagacggtggtagcaacctatttttatattacaggaaacgtcgaaaatattaccaattacattccttaaacaagatgaaaaattttataaaaaattactgggcagtatgtataccaattgttgtattagtcattgcgctgatttatcttcttcagaacaaatcttccgaaagcagcggcaaagatgcggttataggaatggtagatgctgaatttgtggacgtttcggcttcacttccgggtagagttttggagcttttggtaaaggaaggcgataatgtaaaggaaggacagattattgcacagatgaaaacctccgagatcgaaagcatacagtctcaggtttcggaagcagtgaaaattgcacagaatcaactggataaagtgaatcgtggagtagaaccggaagtattgaaatcagccgagaatttacagcagattgcgaaacagcagatggatctgatgtctaaaacgtacagccgttttcagaatctttatgctgaaggagtggtttccggacaggaacgcgacgtaatttatttcaaatacaaagcagcccagaaagaactggaaaccgccaatcttaatgttcagcttttgaaaagaggaaataatgaagagcttaaaaactcagcacaatcggttttaaatcaggcaaaaagtgcggatgaacttacgcaggaaataaaagacaatgcttctataaaagcacccgcttccggaataatttctacggttattgccaaaaaaggagaaatggtaaatgcgggttatccgatgatgacaattcagaaagatcagtctttttttgtcaaatttaatctccgccagaatcagatgacgaaaataaataaaggaaatctggtaaccatgaaaattcccggctgtaccccagaaaaagttcagggaagagtggcagaactggctccggctttaggctatgcagactgggttccggaaaagcagaacggagaatttgaactcagaacgtttcagatcaaagtaaaaccggaaaacgcaggttccatcaaaggacttcgttcaggaatgacggcacagcttatttttcaataatttaattcacaagaagaaccttgaaaacaatcagccagattatcattcgggagtggaaacggattttttcgattccgaatttctatgtggttttactggtcattccgctcataatatttcttttttacggattaatttaccagaagcagtttgcaaaagaacttccgatggcagtttgggatgaagatcagtcttctgtttccagacagcttacggatatgatggatcacagcgatcttattgatattacacaaaagctttccagcaatacggaaatagaaaagttaatgaaagagggaaagattttcggagctgtacattttcctaaaaatctggagtcggatgttaaaaaaaatcatcagtcaaacattactttgtataccaacggagcgtatctggttcctgcaaaaatgatttataaaggagccgcagaagtcattataaaaggtggtcttgccgtagttctccagaaagcggaaaagcagggaatgcctgctgaacaggcaacagctttggttcagccgataaaactgaataccacaacgctctacaatccggattttaattatcagatgtatttaacgcccggactgattacggttggtcttcaaatggctttggtcgtagcttctgttttaattttaaatcttgaatttaaacgaaatacgattgatgaactgttaaaaatttccgcatcttcctcacagattatagtcggaaaaacacttgctcatctttgcatttcatggattctttttgtattggtcgcttacattgtatttcctgtttttgaactgggaaaaccgcagaccgatttcaattttttcctgatctatactttaatgtctttagcctgcatcggcatcggaatgatgctttccgcaatatccaataatctgctatttgtaaccgatgtggctctgttttttacttctccggcttttgttttcagcggttttacatttccgcgctgggcaatgccgtggtacgatcagttttatgcagacattatgccttatacgcactttctggatggttttattaagctttatttcatggagcttcctttatcatatgcaacgcctgagatttttaaactgctgatttttatcggagtaacatttcctttaagcattgtgttttttcagagaaaaattaataactatcttaaagaaaagagcatatgaaggagatcattcagatatttaaaagagagcttcggaatgtttcgaaagattcgagtctgtttctgattttgcttctcgctccgattctgtacgcgttcatgtacggaagtatttatttaaacaaaggagaagaaaaggtaaaactggcgttaattgatgatgacggaacctccatttccagaacattgacacagcagttcaattccacttccatgattgaaatcgttccggcttcaaatattgcggaagggcaggaaaaaatgtatcagggtgaagttcaggggtatttttatattcagtctggattcgagagaaatattttatcgcagaaacaggcaaatgtgaatatggttctcaatgcctcccgttttttaccttccagcgatttactcagcactgcgaccaaagtatgtttaacggttggagcaggagtgaggaaaacgtactttaacaaaaagggaatgggagaagatgaatccatgaaaatgacgaatcccatcaatatggattaccgtccgctttacaacgcgagtatgacgtatggaggattccttttgcccggtttattggcaattattcttcagcagacacttctgattggtgttgcagccgcttttacttcagaaagggaagaaaataaactgctgaatctttatgaaatttcaaaacagagcatttctaaaatgatttttgggaaaagcatcctttatttttttgcttttatgattttcggattatttttcgctgtagtgaatttctctgttttcggagttgaaattcgcggaaaagctattgatcttgcggtaatttttgcgttatttatttctacaattatcgttttcggaatgctgatcggaagcttttttaagaccaaactgtttgcatttcaggttcttgtattttcctcttatccgatatttctgattacgggatattctatgccgtatcaggctttgccgaaatttgttcagtttttgtctgatgctttgccgacatctccgtttttaaagacctttatttctattgtacaatccggaggttcgctttcagataatcttccgtcggtcattcatctgattattttatggatcatttttgaaggtcttctgattctgagaataaaatatttagtcagttcatcaataacagaaaataaaaacaggagtaatcttttttgatggtcaacggatttttaaaaccaagcaaataatcctttcaaaatttctttaacaaattttaataaaatttatttatttgattatcaattatttatgtgttttaatcttttatcactaaaaaaatagttgtttggatggattttatttctacatttgtataactaatttcttagtgatatgaaattttcgtgaatatttttatgtcacgtttaatgataaaaatgaaaaggatatgaaaattcagactttaacaaaagcagaagaacaggtgatgcagtatttatggaaactggaaaaaggatttctgaaagacgttcttgatcttttccctgaaccgaagcctcacaccaataccgtttctaccattttaaaagtgctgaaagaaaaagaatttgtagactataatgtatacggaagacagcatgaatattttccgttagtttctaaggaacagtattccggaaaaaccattaaaagtctggtaaaaaattatttcaaaggatcttacaaaagtgccgtttcttttctggttgaaaaaaatgaaatgacggtggaagatcttgagatgttattaaacgaacttaaaaagaaaaactaaccatggaaactgtacttctctatttcggaaaagttattttatgttccggtgtaacgtttctgtattatcagttgtctttaaaagacaagacgtttcatcactacaacagattttatcttttgtctgcgatgctcatttctttattgcttcctttaataaaggttgaagactttaccattgaagtaagcaatgacttgtataagttgatagatcaggtacagaattttaataccattaaaaactcaaacaatgattacatttattttagaattattttttcggctttgggacttgtttctttctattttttaggaagattcgtctacgggattttcagaatccaaaagcttaaaagtcagtttcagaaagaaagtttcgacgggattaatttttaccatacaaacttatccgaagctcctttttcttactttaaaaatcttttctggaagaattccatcacattgaattctgatctcggaaaacagattttgaagcacgaaatggtgcatattgaacagaaacactccttcgataaaatttttattgagattattacctctgttttctggttcaatcctttttttcatctcatcaaaaaagaaattagtttaattcacgaatatctggctgataaaaaagccgtaaaacaatcggacaccaaagcatttgcgcagatgcttttagcaagccacttttccggaaaccagttgcctgcaaccagtccgtttcttagttcaaatctaaaaaaacgattaaaaatgttacaaaaacctaaaaccaaattcgggtatgcgcgtagaatttttgcattgccggtagtattttctgttgcgtttgcctatttagtaaatgctaaaaatcaggaaattaaagcaacgaatatagaaattgagaaagccgtttctcagattaaaaaaggagatcaaattatcattaaaaaagatacctttactccggattcaaaagatcgtgttgtcataactccaaaagtgtataaaaaatcggaagacgacaaaaaaatagcagatttaagcaaaaagattcaggaaaaaagccagaatctgaagaattttaagcctgaaagtgacgagtacaataaaagcctcgaagaaatcggaaaactatccggagaaatcggaaaaattgcaagctcaaaagattttctgaaatcggcaatggtgatccgaatggacggaaaggatgttaatatcaacgattattttaaatccaaagaatggaaagatcaaatgaaagagctggaagaacttagtattgagattcctgaaattccagaaatgaattttgaattttccgatgctcctccaagtcctcctaatgcgccaaaagcgccaaacgctccaaaagtaaaagtatactctttccgtgattccagagatatgaaatggtcgccggaatctgaaaacagcttcagtttttccgaaccaaaagtaaaagaatccgcggcaatcgctaaaaaaagagcgaaacttgagaaagaaagagccaaactggaagaaaaaagagccaaattagagggcgaaagagctaaactggaagcagaacgaagagcattggacggaaacagaaaagtgtacatttatggcaatactttcagaggtttcccggatgaaaaagtgttcagaatccatgcagacaatattaaaatcgataataaaaatcaatctgttgttgcttcgggcatcaaaaatctaaacggagcgggagatatgaagatctatattaacggaaaagaatctaccaatgaagaaatgcaggctctggattctaaaaccattaaaagaatggatgtaaacaaaagaaacatagacggaaaaatgcagggcgaaatccgaattcagactaaataatcaagttttttaaactctgctgattatttcaaagctaaataacagcagagtcttttttaaaatgcagtttatgaaatataaattactcctctttttattggcgggaattcttgccaatgcacagatcaaccgttttttctatgattacaaattcattcccgattccaataataaggaagacgtgaaaagcgaaatgatgtaccttgatattgataaaaatggttcgaattattacagcagaacaaaatttgtcgccgattccacttccagagcagaactggaaaagcagatcaaatcgttttccggaaatatcagtgttaacagaagagaaaatccgggacaggtttcattcaaagtaaccaaaagttatcccgattttaaaacatatcttttcagaagtgtttcttcggatcagtataaaatcagagaagatcagaaaccggaatggaaaattttatccgacaagcagaaaatcggggaatacaatacgcagaaagcaaccacaagctttggcggaagagaatggattgcgtggttttctacggatattccttttcaggacggaccttataaattttacggtttaccgggactgattgttaaaattgaagatactacaggttcccacatcatgactttggtcggaaataaaaaggttacccaagctgttgcttcagaaaaagaaccggaacttccgcaaaacatcagggttttcggaatgggcggaaaggaacttgaagtaacggaagatcagttcagaaaagcgtggaaagattatgtaaatgattctgctaaaaacatgagggaaatgatgatgaggaataccgataattctaagatgacttttaaagtaaaaacttcagacggaaaagaaatctcagatcctaatcaggttttcagggaaatggaaaagagaacaaaagaatctctggcaaaaaataacaatcctattgagccggatctggtaaaataataaattaaatatttcttaaaacagggcaaaagtaatttctgccctgttttgtttttattatctttagaactgcaaatcataaaatatgacggaaaaggaaaaatgtgcgaaaggacttttgtataatgccaattacgatcaggaacttattgaagaaagaattaaagtaaaagatctttgtcaggaatacaacctcctgaaaaattctgatgctgaaggaagagcggcactgctgagaaagattttaggcaaaacaaaacagaatatctgcatagaacccagtttctggtgcgattacggatacaatattgaagtgggagagaatttctattcaaatcataatctggtaattctggattgtgcgaaagtaactttcggagatcatgtttttatcggtcccaactgtagtttttacaccgcaaatcatcccatagattttaaacaaagaaacgaaggtcttgaatctgctcatcccattacagtaggagataacgtatggttcggaggaaatgtagtggttcttcccggaatttctatcggcaataactcggtgatcggagcgggaagtgtcgtaaccaaagacattccggacaatgtggttgcaatgggaaatccttgtaaagtggtgaagaatataatgaattaaaaatttaaactaaataaaaaatattaatgaagaagatcattattgcgtttgcgttgatattgggaatgttctttaatgctcagaataaacgttttgtttatgagtacagatttgtttcagattctacaaaaaaagatgtatcgatcacagaatcgatataccttgatgtttctaaaaaaggttcgaaattttacagcagagataaatatatttcagattcgttgatcgaggctcagtcgaaacatcagaacggagatttttctaaaattaatttcggaatggttccttatgttgttcaaaaatcttatcccgactataagattttgtttttcaatcgtctggatatggatgagtacaaagtttctgatgacaggaaaatggaatggaaaattttacctgaaaaagaaaaagtgggtgaatttaatgcacaaaaggcaacaacggatttcgccggaagaaaatggacggcttggtttgttgccgatattccgattcaggacgggccgtataaatttcatggattaccgggattaattgtaaagctggaagatcagacgaactctcattcttatgttttaaaggaaattatagatttaaaagatcgggaatggaaaagtcaggaagaaaatcatagattcggagcattgattcctttaaatcaggaaaagtataaaaagcagtttctggattaccggatcaatccgacaaaaggaatacggcagatgctttccagcggaaccaaaatcatgatgaccgacgaaaaaggaaataagctggatgtggaagacatgattcgagagcgtgagagaaaagtgaaagaagacaatgcaaaagacaataatcttctggaactggatttactgaaataataattacggcgcggaaacgaagtttccgcgccgtaatttattatgaaatataaagatatattaagataatttctgagaatctgcaacaaactgcgccaatccgctgtctgttaaaggatgtttcagtaaactcaagatcggaggaagcggtgaagtaatcacatctgctccgattttagcacagtcgataatgtgcatcgaatgacggatagaagctgctaaaatttcagtttcatacatataattatcaaaaatcaatctgatttcctgaattaaattcaatccgtcagttgaaatatcatccagtcttcccaggaaaggagaaacataagttgcacctgcttttgcagccaaaagagcctgtcccggagagaaaatcagcgtacagttcgttttgattcctttatctgaaaaatattttaacgctttgattccgtctttgatcatcgggattttcaccacgatattcgggtggattgctgccaattcgtccccttctttaatcatttcttcatacgttgtagaaagaacttccgcagaaatatctccgtctacaatttcgcagatggttttgtaatgatttttaattgcttcagctccctgaattccttcttttgccattaaagacgggttggttgttaccccatcaagaattccaagatctttcgcttcttttatttgctctaaattagcagtgtcaataaaaaatttcatttgttgtacagatttattttgtacaaagataatcattcctttttgagtggaaaattaattaaagatgagattctgcattcaggaagagtttctgttaaaacaaaagtgaatagtagaaaattacgattcccatccttcggaggggtggcaaaaaatcaaagaatttttgacggggtggttaaagatttacagttttaaaataatcactaatttagttaacaataaagtagtaatgaaaaaccatttcaccgcgaaacttgaaattatcgggattaatccgtttgtctttcttcctgaagaaattcttgccgccgtatttgaaaattcaggcaaaaataaaagtccgattcccgtaaaaggaatagtgaacggcaaagaatttaagcagaatttaatgaaatataagggagaatggcggttttatattaatgtaaccatgctaaaagattcaccaaaaagaattggcgaaacacttgatatttttattgaatatgatgactccgagagaaaaatttctatgcatcctgacttggagaaagccatcaacgaaaatccaattgccttaagaaactttgaaaaattaagctcttcaagaaaatcagaactgataaaatacatcaatcatctgaaaactgaaaaaagcatccagagaaatattcagaaaatcattcagcatctgaaagaagaaacagactttttcggcaggaaaatttaataaaaagaaaaaagatccgaagacaatttcttcggatctttcacaactatgaatttaaagctttgcttaactttacagcatcctgattggtaggatcgtactgtaaggacttagcaatatgctcctttgctttatcaggattgctctgctgttcggagaacgctacgtaaaaatatgcgtatgccagatttttcttattctgttccacctcttcaggctttaccgttgcaatatacttttcataagccagttttgcattggcatcgtcttttgcagactgataggcataagcctgactataataagatggcgcccaatccggtactaaagccgaaatctttttccatgtatcaattgcgtttgtccagtctgaagcatcctgatacgctccggctaattttgccaaagcttcggtatctttcgggttggcttcgatctgtttttttagaccgtcaatcgttggatttcctgtcgactgagcggttgttgtggttgtttttgcagcagttgtactgtctgtctgtgtcgtctgcgcatttacaaaacttgcggttcctataaacatcaaacctaaaaacaggttttgaatattacttttaatcattttcataatcttacatttttcaagttgataactaaagttcaattataattccataaacgtctaaattttagaacctttagacttttttggaaaatattaacgagattctatgtttttttatcattatttttgattcgctgcagattcggttatctttgtaacacaacgatcataagacaaatcatccgttatgaatatcattttggcatcaacttccacactctttggtggagcatatctggaatatctgagagaagaattaatcaaattatatgatggaatcgacgaaatcattttcgtgcctttcgccagaccggacggaatttctcatgacgattatacagcaaaagcacgttctttttttgaaaccataaatattaaagtgaaaggtcttcatgaatttgagaataaaatacaagccataaacagtgcaaaagcattttttacagggggtggaaatacttttttactggtaaaaaccttacatgaagaaggcttgatgaatgttttgaaagaaaatgttgaaagcggaaaaccttatctgggatgcagcgcaggaagcaatatcggcggacagaatatgaaaacaacaaacgatatgccgattgtatatcctccaagttttgattgtatgggactggttccatttaacatcaatccgcattatctcgatccgaatcctgaacttaaacataatggtgaaacaagagaaaccagaatcaaagaatttttaacgcagaatgacctaaaagttgtcggacttcgtgaaggaaactggatcagaagaatgggcgataaaattaccgttgaaggaatcgaactcacgagaatcttcgaaaaaggaaaagagccttatgaaatcaaacccggaactgtactgtaaattttattttaattatatttgaattgaagaatttgatttgtaatcatatgtaaataaaatcagatgcttcgcaggttcagcatgatatttctgatactaactgttttatttcaacagtttatttgtagcagtgtcatgctgagcttgtcgaagcacatcaataaagcgatcaaaagaataaaaatcaaagatttttaaaaactatggtgagctttttcatttataataatcagctttaaataaaagtttagttcttcttttgtgacttttgcggttaaataaaagtttagacatacttaaaaacatgctgaaaaaataaagcagattcttcattcctaacaaagacaataaaaagtttataaaaaaacgcaatgaaaaagacattggctgttcttacattatccacgcagattatttttgcccaaaatattactcagaaactggatgaagcaaccaaaaacctgatgaattcttcaggggcaatttcgtctaacttatcattttatgtttccgatgaaaacggaaattttatttacgaatatcagggaaataaaggactttccacagcttctacgcagaaaatatttactgccggagcagctttggaggctttaggaaagaactacacctataagactacttcatcatattccggaaatatttctggtggaaacctgaacggaaatcttttcatcagctcaaccggagatcccacactgggaagctggagatatgaagcctataaacccgaagtttttaagcagaaattaatcgatgctataaaaaaatccgggattaaaaaaatttcaggagatcttgtgatcgacgattcttattttgatcatcagacgattcctggaggatggccatggaatgatcttggaaattactatggagccggagtttgggggatcaactggcgcgaaaaccagttcgatatcaatatcaacggaaatgaattcaaaagcttttcttatccgcttgaaggagttaattggctgaatgatcttaaagtgggcggaagttcagatcagagtctgatttttacggcgccgcattctgacgttgcgctgattaacggaactttacctgccaaaacggttacggtttccggtgcggttcccaatccgcctttgcagcttggagcggaagtgaaacaatggctgaaagattcgggaattgatttttcggggaaagtggttaccaattcccaattggaaattgaaggaaaaaaagcattgcagactccgaaaaataatattattcttacctacgaatcgccgactttagataaaatcatctattggtttctgagaaaaagcatcaatttttacggtgaaactttaataaaaacgttaggaaaagagaaaaaaggcgatccaagttttaaaagcggagtggcttatttaaaagaattctggaaatcaaagggaatcaacccgaatatgattaattttgctgacggaagcggactttctccgcaaaattatgttgctgcgaaagcagaagttcaggctttgctgtacgccagaaaacagccttggtttgaatcttattatgaaggttttccaacacacgataacggcatgaaaatgaaaagcggaacgatgagcgataccaaatcttacgcaggataccacacctcaaaagacggaaaaaaatatgttttctccattatcatcaataattatgaaggaagcggaagcacagaactgcagaaaatcctgaatgttttaaaataaatttgccttgaagaaatccatatttgcaagacttaacaactggattatttttacgctgatgacaattgttgttttaacgattgttattgcttctacgatcctttttaatttcctccgaaaagaagaagtaaaaagggtagatattttagtgactgcgctgaaatttcagcaggaagtgaaggttccgagtctggaaattcaggcattgctgctgcagatttacagttctaataccacgattccggtgattattctggataaggacggacagattattgagcataaaaatattccgcgcgatattgaaaataattctgctgaaattgttgctctggctaataaaatggctaaaagttatccgccgatcgaaataaaagttcccaatgcaaacaatcagtttgtatactatgataattccgaattgctgaataatcttcggtattctccttatattttaggctttttcattctgtgttattttcttttttcattctggtttttacggacgataaaaaaaacggatgaaggctatctttgggcaggtctggctaaagaaactgcacaccagatcggaactccattgtcttcgatgatcggctggatggaaattatgaagctggatactccggattctgaaggcgttcatgaaattgaaaaagatatcgaaagattaagaactatttcggagaggttttctaagatcggttctgttccggaactgaatgataaagatttcaactctaccattcaggaaaattacgattatctgaaaacaagaatttcaagaaagattaattttggacttcatcttcccaattacacgattttggttccccataataaaatcctgatgagctgggtgattgaaaatcttgttaaaaatgcggttgatgcgatgaaaggagagggctctatttcaatgtctgttttggaaagaaacaaaaatattgttgtggaagttcaggatacgggaagcggaatgacgaaacaacaggcaagaaatgcttttaaaccgggttattctaccaaaaaacgaggttggggactgggattgtcgctggcaaaaagagtgattcaggaatatcacaacggagatattaaaatttcccagacggaaataggaaagggaacgacttttaggattacgattaagaaagggtaaattgtttcaggaatgtgctgcgtaaagtttgtcattccggaggaatctaagctgtgaaatttatattttgatttttgttaactgacaatttttcattgaatatttataaggagtgacctgaattttagccctgattgaagctttgtctgagctcattttgtgtatttggggtttgcggcggcgaagccgccgcaaaccccaaatacacaaaatagcgagtgcggaaagcaggaaaaagctcctaaaaattatccattatttacagcatttacaaagacttcgacaagctcagtctgacaaaatttcaaaatagcagttggatttagtaatgttatgctgaacttgcagaaacatccgtttgctcaaaaactcttgctgcccacattgacaataaaaaaagcggagaaaattccccgcttgattactaagtcctaattttaatcttagctgcatttatttttttccggttaaccactgatcctgtaatttttgttcagcggctgttggattagatttgaactgaagcgtttcgattgtcattttatcaagaactgctttccctttaagatcgattttctctgttttgtcaccattttttcttaaaacggttactgttacgttttgtccttccttcacagatttggcatattctacaaaagactggatattctgaacattgatggtttttccgtcgagagcaacgattttatcagtgattttaaatccgatgctttttgaaaaaggagacagagcagaactttcgtcgaatacaaatgcattgtccttatcatcaaaaccggtctgttgaggatctttaatgaaccagaaaattggcggagtttcctgtttttttgcttctacaccaacaagactcagatattgtgcataaggcgtcggctgatctcctgcgatgtatttattgtaaaagtcttttacctgaggataccctgtaaccgttaccagttcgtcaatcagtttatcgtctttaaacggtttgttttctccaaatcgctgagacagttttctgatcatgtcacgatagcccatttctccgttggacagctttctcagttcgatatccagacacatcgcaagaagcgctcctttttcgtaaacgtttctgtattggtctttgtattcgtctttaagaacatttttactcattaccgtaaaaggcatggtatcattatagttcttggagttggcgattttttcgctcattctctgaaggaattcatcttttgtgatcagaccttcctgaatctggaataaatttgcaaaatactccgttccgccttcatacatccataaatgctgagacattttcggatctgcataatcgaaataatgaatttcttccgaatgtgttttcagaggatttaccgtatggaaaaactcgtgagaaacaacgtccgtaatggttttgtcaatcgcatcttttggcatcatttcaggcaggacaacacttgtggattcgtggtgttccaaagctccgaaacctttgatatgcggttcttccatccctgaaagataaagcatgatcgcatattttttgttggtgttcatatcacctaagaatttcttctgtgcgatcaccgttttttcaagattttctttgaaatcagcggctttgtattttcctgtcggagaataaacgcctaaaacaagatccattcctcctgcattgaacgtcacataatccggttttgtatacattaacggagaatcggtcacttttgcataattcgctaaagtataggtatctgtagattcagatttatcctgatctaccaaagcggttgttccgtaaaaatctgttggtttctggataattaactgataaggaacgtcctgcatattatcaatataacctacaaatccgtgggtattgattaaataaacttttccggtttcaatatctgttcccgaaggtgaaaataccgctttgtgtttggaatcgtccatttcttcatcgaaactgtcattcacaagataagttactttgcttaaattctgagcgtttttcagagcgtaagtgttgtcatttacttttgtgaaagcaatctcttttcctttgttatctaaaaatttaattccctccacaaatcttccgtaatcgtctacagaataagttcccggaactgttttaggaaaatgaaacttcacgtcaccggatttcatttttggaaattccatcgttacggcaaccttatcgtcttttacatttaccaaatctatcgtagtttttatagactgtgcatttacaaaaaacgcagccagtaatcctaaacttagtgctatttttttcattgagttcaaattatattcaagtagttgatgaaaaattgattttgttactttaaaagttttaaatttttgttaaaatttacagagagtaattaatttaatactaattcctgaataaatgaaacaaaaaagcaaaaccgaagaacgattttgcctgtattattaagattttactgtacctttttataatcgatataataattttcgttaaactgtaccggagttcctttttttagctttacagtctgccactgttcggttggatttatggtgattccgtcaacaataataggaagttttaaattctttacaacgttggtgtagcggaatttcagttcttcgcctttctgagaatattccagtgtcggaatttttgtggttctcagatattgattgaacacactcgaaaaatcaattccggatttctttgaaatataattttcgatctgttcggtggtaaccgtctgatgataaaaatctttattgattcctcttaaaatttctctgaatttcgcatcgttattgatgatctgacggatcgtgtgaagcatacttgcgcctttcgggtacatatcgccgcttccctcatttctcacgccatattttccgatgatcggaacatcattctgaataccgtttcggattccctgtgcataaatatccgcagattttttgtctatatatttttcggtgaacaagacttcggagtacatcgtgaaaccttcgtgtacccacatatctgcctgatcttttgctgtgatattattcgcaaaccactcgtgtccgctttcatgaacaataatgtaatcccagtttaatccaactcccgttccggaaagatcctgccccagataaccgttttggtaagcatttccatacgcaacgttactttggtgctccattcccaaataaggggaatctacaagcttgtaagaatcttcatagaatggatagggtccaaaccagtattcaaaggctgaaagcattggttttacctgctgaaactgtttttttgctttgtctaaattataatcgattacccagtaatccagatccagtttccctttttctccgttaaaagtatctttgaagttcacatattttccaatattcggaatgatagagtaggcgttaatggggttctttacttcccatgtataagccattttatcgccttctgcatttttactgattaatcttccgtttccaactcccactaaatcttttggagtaataattttcatcacaacgccattgtcgggttcatcgtcccagatatctttggtaggaagccagatggaagctccgattccttcatcggcaacgctcatccacggatttccgttttcatctttggtgaaaacccagcctccgtcccaaggagctcgttttgcaatggttgggtttccggaatacgttacatcaatggtatacttttctccttttttaaagcttttattggttttgatccagataaaatcgccatcctgtttatattctgcaaccggaaaactggcttccactttatccgctttcattggctgctgcagatcaatctgaaacgtagggtttgtaacgtctttaatgatctcaaaactgatcttgttgtttcctttaatgcttttccgagaaaaatcaggttctacggaaaggtcgtattttttgacatcccaaaagtttcggaattgtgtattggaaccttttaaggtatcctgttttgtgaaaaccttatctttctcgaaaaactgtccgaaagaaagacttgccgcaaacaaaagcgtatatgaaagttttttcatctgaattaaattataatggctaaaatataaattaataaacgtataataaagtggatattaatgattatgatcctcataattagacgaagcaaataaaactttgttacattttttgaatttattatttggtaatcagttgtttatgtaatgtaattcccctcctttggaggggtggcgaaaattcataagaatttttgacggggtggttaaaaaaacacaatccgcaaaagacttattatcaatattttcagaaacaattcttttccacgcaaaaaccctagccgcgattgcagcaattgtctgagctcattttcaagattcaggttttgcggcggcaaagccgcaaaacctgaatcttgaaaatagcgagtgcggaaagcgcgataaagctcctgaaaaagaaaaatcccgcagaaaatctacgggactatattttgaatggataaaaattatttctgaactgcaggtaaatttccagccgctttctgaactttcttataggtatacgaacacatgatgatactgaattcgtacagtaaaagcagtggaaatgctgccatcaacatacttaaaacgtctgccggagtgataattgctgcaaccaccatgattaaaacaatcgcatgacgacggtatgttttcataaaggttggtgtaagaattccgatggttgtaaggaaatagatgagaaccggaaaaaggaaaattacccccattcctaaaactacctgtaaaaacagagttgtataatcacttaaatcgtaaagcggaatgataatatcggaaattttgaaaataaccccaaaattaacggcaaaaggaaggattaaataatatccgcataaaacgcccgtcatgaataaaatccaaaccgaattgatgataaagattgaattttttctttcattcggatgaagagcgggactgatgaatctccaaagttcccacacaatataaggaaaagccaaaacaattcctccaaaaatggaaactgccatcatcacattaaactgctgataaagcttgcttgcacgaaccggaaaatctttcggaaggtgaatgctgtcttcgcccaaaatcattttggaaaaatgattcacaatctcaaaggtcgcaaaatcgtttcgggtaggaccaaagaaaacgtgatccataatccagttgatattgaaaccgataataactgcagcaattataatagcaagaattgaacggatgagatgacctctcagttcaccaatatgtccccaaaaagacatgtctttagcatcactcacaggataattttttttaagatttcaaatttagggaatatttattgattctaagtttgttttttaattagtatttgtatttcagataatcaataagacaaaaatataccaatcttctaaacattttttctgcatcattaagttccattcttgaggaaggagtctggtaattcatattaccatgccttgcaaatatgccaattactccgtaattgtttgctgtagcagtaaaagctctaatatcttcttgtgtatagccagagtttttacacaatttattaaactttttctttccagtaattgtttttaaacaatctaaaatacaatataatgagatgtatgatgttttgtagctaaataataataatatattttcaatgctagtgtcaatttttgatagataataaaaataatttaccaaattatcatttttaagtttgtctaatattgaagcatttataggaaaagaatatgttagatattgaggtctaactaaaaaatctttcgaatcattattgaacttatatattacattttcttcttgccaattaaaaatattgatgggttcaagattaagtctaattcttaaattttgataattatccatggaaacaaaataacttccattaattattttcaaaataaaattagattttccagcaatttctgttgcagagttttcattatctaataaattagggataaaaatatgaccactaaattcatttttatgatcatcttggaatttaatatcgtcaaaagggatattatgaaggctattcaagtatccttgatttccatttatcgtaatataatattttgccatttttaattaattccttcatccagcaatttgtgcagatcaataatcccgaaatattttccgttttccgttaccacaagttgtccgatattattgtcttttaatattttcatggcttctttagccagagcatttctttcgatggtcttcggatgtgcagacatgatgtcttttgccagaactttagcgatatcatcaccttttaagagcattcttctcaaatcaccatcggtaatcaccccgataatttcgtcattattcgttacaactgtaattccgtgtcgggaaccgctgattgagatgatgacatcttttaccgtatcattttctgtaacctgaggtttttgggaagatagaaaatcatctacttttgaaattaaatttttacccagacttcctcccggatgaaatttagcaaaatcattcgctttgaaatcattcatttccattaaagcaatcgccaaagcatctcccaaagccatttgcagagtggttgaactggtaggcgcaagtttattcgggcacgcttccttttctacatacgtatctaaaataatttcggaaaattcggcaagtttgctggatttatttccggtcattcctattaaagcagaagaataatctttcagataaggaaccagattcacgatctccggtgaatttccggaatttgaaatgcacaatacaacatcctgtttctggataacgcccagatctccgtggatggcttccgaagcgtgtagaaactgagaaggggttcctgtagagttcagggtggcaacaatcttatttccaacgtgtgccgatttcccgattcccacaacgataagttttccttttgctgaatgtatgatttctacagcttttgcaaaatcttcattaattctggatttaagtttttcaagttctgaaatttctatttctaaagtgcttttcgcgattgatatgatgtcggctctttccatttttctttttacagcatatacaaaaaatctcttaaaaaacgttatatttttaaaaggatatttaatataaattttattttttataaattcgttcgcttttattttaagcgaaaaattcatatctttgggttagatgcaaatttagcaatagaaaattagatgagcgcaaaaaaagccaatttatcaggcgaattgaaaaaatatttcgggttttctactttcaagggacagcaggagcagattatagaaaaccttttgaacgggaaggatatatttgttctgatgcctacaggaggaggaaaatccttatgttatcagcttccggctcttatttcggaaggtacggcaattgtggtttctccgcttatagcgttgatgaaaaaccaggtagatgccgtgaacgggctttcatctgacgatggagtagcacacgttttaaattcatcattaaacaaaacgcagaccaaacaggttttcgacgatattaaaagtggtaaaaccaaacttttatatgttgccccggaatcattaatcaaggaagaatatttggattttctgaaagaagtgaagatctctttctttgcgattgatgaggcacactgtatttcagaatggggacacgatttcagaccggaataccgaaatctgaaatccattatcgataaaattgccgatgtaccggtaattgcacttaccgcaacagctacaccaaaagttcaggacgacatccagaaaacccttgggatgacgaatgctttggtttttaaagaaagcttcaacagaccgaatctttactatgaagtgcagccgaaagtaaacgtagataaggaaattgtaaaatttatcaatcagaataaaggaaaatcaggaattgtttactgtctgagccgaagaaaagttgaagaatttgcacagcttcttcaggtaaacggcgtaaatgcactgccttatcatgcaggtctcgaccagaaaataagggtagccaatcaggataaatttctgatggaggaagtggatgtgatagtggcaactattgctttcggaatgggaatcgataagccggatgtacgttttgtaattcattacgatttcccgaaatctctggaaagttattaccaggaaacaggtcgtgcgggaagagatggcggagaaggtcactgtgtggcttactacgatccgaaagatattgaaaaactggagaaattccttgctcagaagcctgtttctgaaagagaaatcggattacagcttctcaatgaagtggttggatacgctgaaacttcaatgagcagaaggcagtatattctgtattattttggagaaaattttgatccgatcaatggtgacggcgcaaaaatgtgcgacaattcatcgaatcctccaaaattaaaagatgcaacagacgatctgagaaaagttctggagcttattaatgatactggagaaaaattcaaagccaaagatctgatctcggtcatcgcaggaaaagaaactgcagttactaagtcttacaaactggaacagacttcttatttcggtttcggaaaagaagaaaaagacaaccactggaaaacgattttaagacaggcaacggttcagaattttttacagaaagatattgaaacctacggcgttttaaaaattgctgaaaagggaagacttgttcttgacggaaaactggaacattctttcttaattgcagaagacagagagtttgatttaacacagacaaaagcggaaagcgatcaggttcagatgcagtccggaggcggtctggatcagaatttattcaaccagcttaaagagttaagaaaaaaagttgccaaaaaacacggaattccgccttacacagtgtttatggatccaagtttggaagatatgacggttcagtatccgattacggtggaagaaattactaaaatctacggagtcggagaaggaaaagccaagaaatacggtaaagaattcgcagattttatcagtaaatatgtagaagacaaaaatatcgagcgaactcaggatatggttctgaaacaggtggcaaacaaatccagccacaaagttttcatcattcagagtaccgataaaaagatcgatcttgaagacattgcaagagccaaaaatctttcgatggacgaattgctgaaggaaatggaacgtattgtttatcagggaaccaaactgaatatcgattattatattgaagataattttgatgaagatattgttgacggtttcatggaattcatgaatgaatctgaaagcgacagcatgaaagttctgcttgatgaattcggagacgaactttcggatgaagaggtgagaatgttgagaataaaattcatcagcgatgttgccaactaaatttattttaaacaataacgaaattataatgaaagaaattcttccacggaagagtttcttttttaatactttagaaaaagcaagaattgtattttcccttttttatgttgctatttctatattttttatttcttgtaaatcatatatttcaattttaggagtaataatgcttagtataggtttgtattttgccatttttaaatgggttttaaaatattttgaactaaagagtaattactatttaataacaaatcaaagaataataattttagaaaaattgactgatgatattgagcaggagcttaatcttgcgcaaattaatcttatcaaggctgaaatgaataatcgttttttcggaaatataaactttaaagaaaagagaaatatttttaatgaaaataatgacacaactttatttttaggtgaaagaaaaatacattttgataatgctaaatatgcttttcttagtgttgaaaatattaacgagattattcctgtttttgaagagcttggtttgaaggttaagaaaactttttactaattttacagtgatgaaaaagatttctgtcatatttattctgccggatctggaaaccggaggcgcggaaagaattgttaccaccattgcaaatcatctctcacgggatcgttttgagcctaagatattgcttctgcgcaaacagggaggttatctcagtattttgaaagatgacgttgaaatcattgatgttaatacggaaagaatcagacattccttaaaacctattctcagggaaatttaccgcagaaagccggatattgtattttccggatttggagaagtaaacgcttatctgtctttattcatcaaagtttttcccaagacaaaatttattgcaagagaaaccaatgttgtttctcagcacgttaccagaaaggaaattaaatttttctacaacttctataacaattacgatacaattattgcgcagagtgatgatatgaagcatgatctgatgcttaatttcaagattaagccttcgaaaatcgttaaaataaacaatcctgtagattttgattttattgatgaaaaaattaaaatttcccataaaccggaaagttttaaatacggctataaaaatgttgtcgcgatcggaaatttatcggcaagaaaaggttttgataatttactgaaggtattctcgaggcttaaaaacgaaaatatcctgcttcatattttaggagacggacaggatcgtgaagttttgcatcaaatgaaagattttttaggtctgaaaaatgtgatctttcacggaagacaggaaaatccttatcagtttttaaaatatgcagacttgtttatcctttcatcaagatatgaaggttttccgaatgttttgcttgaagccggagcttgcggaacgtattctttagccaataattgccccggaggaattaccgaaatcattcaggacgacaccaatggtgaaattgcgaatattgaaaattatgaagaattttcacagaaaattatgaaaattcttcatggaaatcacgaaaatgaagccattaaaaattctataaaatccagattttccaagaatattattttaaatcagtacgaaaaggtgttgctggatctgatgaaataaccgtcttgagtattcagctaatattttttaattttggacttttaatttcagaaaacaattagtaatgattaaaatccagaaactgggatgcgcctgcgaaaaaccgacttccacctatacagaattcagaacgtcagaactgggaatcgatcaaacgaacggaagatttgccgaagtaagcattcagcagtgtaaactttgccagagaatctggattcgttattttgtggaatatgaaagtttttccaaatccggaagatggtacaaaggaattgtttctaaaaaagaccgtcctgacataactcctgaaaatgctgtacaatatctcgaaagccttgattggtatgtttacggagtctcatattttgaaagcacaggagaattcggacaagggaaactgaggttggatttgtaaggttttagcattatttgatgaaataaatatgaataagtttgaaaagctaaagcattacaggtttattaaaaaattacgttcaaatgcgattgctattataacagatcaaattgagatgcactccggatattttaaaatgcattatcttattggaagaataaatgatatccaacctttagataacattgatttaaatattttagagaaatactatagcgaaattcaattttatccagttggtgaagaaagaaaactttacaatacagagtatcttatcaaacttgattcaaaattaaaaatagtagacacgaaatataaaaatttacttgatgaaaaatgtaaagaaatcattgagaaatttaaagacattcaagattattgttgaaaaatttttataactcagacttctccttaaaatttgacaaatctcactttctcacgtggtaataaatcgttaaatttgtaagcataagaaagttaataataaacaaattcataaaataacatgagtcaattcgatgttaccgtaatcggttccggtcctggtggttatgttgctgcaatccgtgctgcacaattaggtttcacaacagcaattattgaaaaatatccaactttgggaggaacttgtcttaacgtgggatgtattccgtcaaaagcgcttttagacagctctgagcattttgagaacgcaaaacacaattttgcaggtcacggaatcattatcaacgagcctcaagccgacattgcaagaatgatcgagcgtaaaaatgaggtaattaaacaaaatacagacggaatcagctatctgatgaacaaaaacaaaatcactgtttttgaaggtgttggaagcttcgaatccgctactcagatcaaagtaacaaaaaacgacggttctacagaaaccatcgaatccaaatataccatcatcgcaacaggttctaaaccttcttctttacctttcatcacgttagataaagaaagagtgattacttctacagaagctttaaatcttaaagaaattccgaaacatttagtcgtaatcggaggtggagtaatcggtcttgaattaggttctgtttatttaagattaggagctcaagtgacagtggttgagtttatggataaaattatcccgacaatggacggagcgctaagtaaagaattaacgaaagttcttaaaaaacagggaatgaaattcatgctttctacagccgtttcagccgtggaaagaaacggagataccgtaaaaattacagcgaaagacaaaaaaggagaagaagtaacagtagaaggagattactgtctggtttctgtaggaagaaagccttacacagacggacttggattggaaaaagctggtgttgagcttgatgaaagaggaagagtgaaagtaaatgaccatttacaaactaatgttgccaacatttatgcaatcggagacgtggtgaagggagcaatgctggctcacaaagcagaagaggaaggtgtttttgttgctgaaactttagcaggacagaagcctcacatcaactataatttaattccgggagtggtttacacatggccggaagttgcaggagttggaaaaactgaagagcagttgaaacaggaaggagtagcttataaagtaggttctttcccgatgagagctttgggaagaagccgtgcaagtggtgatgtagatggtttggtaaaaattattgcagacgaaaaaacagatgaagttcttggaatgcacatcgtaggagcaagagcagcagatttgattgctgaaggcgttattgctatggaattccgtgcaagtgcagaagatatcgcaagaagttctcacgcgcaccctacgtatgcagaagcaatcaaagaagcagctttagatgctaccgcgaaaagaccaattcatatgtaattgattaacaatcatataaataaaaaaagagaaatcagatactggtttctcttttttttggcatgaaagtggagctggagattaaaaaaagtgttatgaaaaatatatttatgagtgttttgtttcttgtaggaagtttttctttcgcgcaggaagcaggaaaagcaggtgagcttttaaaaaacgaggcttcaaaaacagaaatagaatctccgaacgcaaaaagaacggagagcagaaacagcaataattccggattcagaaatcagaacagaaataacaatggattcagaggtaaaaatccaaattaccaatggaatcagcagtacggatattcagaagttttcctgagaattcttgaacagggaatgttcagtgtggaactgggagatcagtttatttccaataattcaggaagattcaggttttttgatcttccttcgggaagaattcctgtttcaatttatgaaaacggttatttattatacagaacaactttgaatgtaagaaacaacagcagattggttctagatttctttaccaatgaaggattgtttttattagattcatatcctgttcagaaccagtcttacggatttaatgactggaatgatgtctggaacaatccctacggaaattcgggaggatggaatgataacgtaaattatcctaatgtgatggataatcagacgtttcagggatttatggcgatgatgaaggaaaaagcttggtttgacgataaaaaaatgatgttcatcagtcaacagggaaaacatgccttgtttacctcgaaccagatccgtattttggtaaaagatttaagttttgataaaaataagatttcccttgcaaaatctatgttttcaaaatgtgtagataagcacaaatattttctggtttacgatgccttagatttcgagagcagcaaacgggaagtgatggaatttgtacaaaattcataaaaaacagtttgaaattaatattaattgattgtccgtttattaacctaaaacttcgacaggctcagcttgacatcgctacaaatcaagcgtttagtattagaggtgtcacactgagcttgtcgaagtgcctgttataaataattgattttcatatcagtgcatagtaataggttgtttaacggatatttaaaatattaaacttgtcaaaacttttttatagtaaaagatgcaaaagattataacactttagttgtttaagttgaatacttaaatggaaagaaagagcacataagttaaagaaatcaaagattttttctctttgcagacttttgaaatactttaaataaacccaataaagtttttttctcttttgcgattaaatttaaaattagtttaaacaacgtattaataatttgatattaaaaagttagaaggagaagctgattgtttctctttttttgtttaaagttttacattttgcagattcgggttatatttccttacctttgcagactaattttatcatacatgcaattcggaaaaactcagactttaaaaatttcagataaaaataattcaggatggatcttaacagacgaatccggagaaaaggcttttcttcctaaaattttcattcaggatgataaggaaattgatgacgaaattgaagtttttgtatatcaggatgatggaaaattaaaggcaactacagaaattcctttggcagaagtaggagagtttgccgtaatgagttgtgtacaaagtcttccaagcggagcttttatggattggggaatcatcaaagatctgtttattccttacaaacagcagaaatctaagatcattgaaggaaaaagatatcttgtttatatttatgtggatgaagatctggaactgattaccggaaccacgaaattcaaaagaaatcctcaatatcaggatctgcctttccagaaaggagataaagtagatcttattatgatgaatgaaagtgaattgggctggaatgtagtaatcaacaaaaaatatatcggactcatctacaattcggatgtattcaaaaagctgtatccgttgtctgaagaatccggttatatcaaagaaatccgtgaagacggaaagattgatgtttccttacagccacaaggttttgaaaatatcgatgagtttaaaaagaaaattttagacaaacttgaagaaaactacggtttgcttcatctttcagacaaatcaactcccgaagaaattaaagacgaagttcagatgagcaagaagaactttaaaaaagctatcggaggattgtataaagataaaattatcgatattctggacgataaaattcgattattgtaattgtttttgactcatcaaaaaagtggtaaaagacaatcaataaacctttgaaaataaaaaaacgagcggaaaattttccgctcgtttttgtttagtctctgttcttaatcagaagccagcctgtatatactctgccgtctgaaacttttatggtataccagtagtttcctgtcgggacaggatttccgttgagttttccgtcccattgcataggttttttataaataatctccttgaaaacaggaagacctcttctgtcgtaaacgttcacttcagttcccggataattttccagtcctgcaattttccattggtcgttatatccgtctgcattgggagtgaatgtatttggaatgttgaatatcgaaaaaggtttctgatcaatgatacagcctccttttgttcttacataaacaatatattctccaatatttaagttcgtgaaaatgttagaatcctgccatgtgaagttatctaaagaatattcaaagctgcctgtcgcagaaaggattaccgttgcggaattgttgctgatatttacggaaacaatttccggcaaaaccgtatagcttacctgaatgttatccgtactctgacagccaaaactattcgttactgtcacagaataatttcccggagctgaaacggtaattgtctgggtcgttgctccgttgctccatagataagatgaaaatccgcttcctgcatccagagtaactgtttttcccttacagaaatcaattctttcaggaaggttgaatataggtttagggttcagagccagatttaatcgaacaatcttaaaacatccgtccggtgttgaaacctttacatggataacggtcgctcctaaatttaaagagtacgcagaaggattggtaattacgttcccaaaatcatccgtataagtgaatgtatatccggaagaattggcaataatattactttgatacgacgttaaattcacaatcatagagtttcctgtcgtactgttacagaacgtcgccgaataatcattggcaggaacattattcgtcgaaagtgttaccgtaattgccagtttttcagattcacagttgttcagcgtctgtgttatgtagtaaactgttccgttcaccagaggagttgtaagcggtaagatatttcctgcggcatcataaaacttaagggaagttccggttacaactaaacttgccaaagtaggatttgccgaagcacaaaaatcctgaacagcgtttcctgtaggtttcggagtttcatttacggtaacctgaacaccgattttatcactttcgcatccgttaatcgtttgagaagcataataggtctgtccgtttaccagagccgttgttgaaggcaaaagatttccggctgcattgtaccatttgatattctgtcctgtaatctgaatatttgcaacagttggattggtgcttttacagaagatttgctgaagattggttgttacaggtaatgccgttgctgttaccgttacattttggttttgtgccgaaatatttccatttccgtcattataagtccagtgaatcacataagttcccggaacagaataggaaaggggatcggtagtggttgccgtaataattccggcacaattatctgttgcctttggaaaattcgaaattgttgtatggcagtctccggtaatgttgggaagatttgttatattagcaactggcggagtaatatcaccaacaattacatgcacagaaaaacttccgtcgcatccattagtagatcctgtaacctgacagatatatattccagagtttgctgttgttgaattgagaattgtaggattttgctgatttgaagtaaatccatttggcccagtccagttataggttgttccgccagttgcattcaactgaatatttgcacctaaacaaatgttcatacttgaattttgaggtaaattattacatctttctagttttaacaagtaaccatcatcattagttgttgatgtgtttattgtatttaaaaaatactcattggcagaagggtcaaaatcacagttccagtgaaaagttccgacataataataactgtcattaagatttactgtttgataaactcttgcatacgcatttggtttataggcattcgtagatcctattctgaaagacgttttatattctctattagggttaaaagttatcgaacagccttctgaatatccgcttccgaatacaatattatttactcctaagtcaggattggcatcgaaagttttatcaaaatatccattaacatgaaggttattataatcatcacaacttaaaccttctatagataaaggaaaatgctgtccgttatttaaatatttttttacatcaagtaaattattgttagtatcgaaccacaataaataaaggctgatataagtattggaaggcaataaatattgattacttgaaggatctacgtcaataggtaaaaactgagccatccattgacctgaaacaataagtttatcatttttatcaacaagaatatcagaataactttggtcttcttgaattccagaccaaagcaaagtcccgttagtgttgtatcgctgcaatgtataccgagactgaccatatatattattcatcgcaaaatagacatcattattagaatttaaaaccaatttattttctattccgttggtaactttttttagccattgaacctgtaaagaagaattaaatttaataatgtacgaagccgccgtagagtttgtatcattaaaagctgtatttgcagcttgttgaaatacaagatcataaaaagtaaaagtacttagatatacatttccgttgttatcaacatctaatgaatttggatttgagtttgttacctgcgtttcattaataaggtttccattaaggtctaaagtggtaattgtagcatagccattaatataatttccttgataaacagatttattggtgagtgcatacacttttccgtttttaaccttcaaatcgtactcaatatcattatgtacattacttattttgtaactccacagataattgccattactatccagtttgatgacaaaggttgttcctgatcctcctgaacttatataatttgttggaattaaaagatttacacctggtcccggatctacatcaattccactgaaactaagggtcttacctaaaagatacatatttccattatcatctttttggacttttgaaatatgatcagcatagtctgtatagcttctgaattgttttacccaagaaaagttctgagaaaacaaaaatccacagcagaaaactgtgcatagaaacaatatttttcgcattggttactaatttttcggcaaatatattaaaatccgctatttcaaaaagattaataaaacgcaatctcagaataagatttaaaatatgatgcaaatcatacaaaattgtttaataattttgtttaacaattttgtcaaaaataaaatttgatttacatttgcacaaatttgtttaacaaaaatgtcaaatcaagcaaaaaaagaccaaacacaggaattaattaaagacacagcaaagaatttattctttgtgaaaggtaagtttgacgctactactcacgaaattgcagatgaagccggtgtcaacagaacgcttatcaactattatttccgctcaagagataacctcatccagattatttttgatgaagctcagaaagtggaaaaagaaaaatctgaaatcatcatgaattctgatcttcctctgaaagaaaagatcagccagttcatagaaggaagtttatctacaagtcttcagtatccttatctggaaacctacatcgtttcgcagatcaacaaaggaaactgtcataaaaaagatattgaaaaagatgaacttgatcgcttgtacagagatatagaagccgaaatggaattaggaaatattgaaaaaatgaaacccatacagtttgttttaaatatggtttcgcttttggtttttccgagtgcagtaagacctctttttatggaaaatttaatgatcagcgataaagagtttgataaaattatttccgaaagaaaagaaatcatattaaatatgttattcaaaaactaaaaaagagttaaagtattttaagaattcattcgtcattcggaataatatcatttaccagaataattacattaaaaaaaataaacgaagtataatattatgaaaaaacgtgtaactgcaaacaagctaaaagtaggaatagcggctgcatttataatgttcggtttttcatgggtgtctgcacagcaacaggtttccttacaggaagctattaaacaggcacttcagaataaagcggaagccaaaaaggcagctttacagatcaaaaaagccgaatataagattgatgaggcaaaagcaggagctttaccacagatttccgcaacagcaggtcttacctacaatcccatcattcaggagtcccttcttgagtttggaggagaaaaaatcagagcacagttcggtcagccgtggaactctaccgcttcggtacagcttcagcaggcaattttcgatcagagagttttcaccggactgaaagcggcaaaatctaccagagaattttatgtgcttaatgcacagcttaccaacgaacagatcattgaaaacgtagcatccgcttattatcaggtttttgttcaggaagaaaatcttaaaaccgtagaagcaagctatgcgaatacgaaaaaagtaagaaatgtaattaaaagtctggtagataacggtttggcaaaatctattgatctggacagaaccaatgttcagcttaccaacatcggatcaaacaaacagacgttaattaattctgtgcagcttgctaaaaacgcactgaagttctacatgggagttccgattgaatctgatattgaactggaagaaaaaacaattgaaccaaaaccggaattggtttcaggaaatttaaaccttgacaaccgtaccgaaatcaaagttttaaacaaaaacagagaacttctggtattcaacaagaaagcgacggaagcgtatctttatcctacagtaagtctggttgccaattacggttggggtgcaaacggagcaaaatttccattaaccaacggacttaaaaatggtgtgctttggagcgattactctgcaattggattaaatattaatatcccgatttttaccggaggagctacaaaagcaaagatcaatcaggcagaaatcgatattcaggatcttgatctggatatacagaatacacagttaagccttaatttagattataaaaatgccattaccaacatagaaaatgctttaattaatattgaaagcatgaaagacaacgtaggattggcagaaagagttcagaaaaatacacaatccaattaccagtacggtttagcaacacttacagaagttctggatgcagaaaatgctttaacgcaggcaaaacagaattatgcgaatgctttgttggattacaaacaggctgaaatcaagctaattaaagcaaaaggagaattaaatacactacaaaacccgtaataaactatgaaaaaaactttaatatatatcatcgtagcagccgtactagttggtttggcagcttacaagattgccggaaataaagaaaagcagacgcaggaagtaaaagaagttgcaaagcaggtagataagatcaatgtaaacgtggtaacggtttccagagaaaatattgatacaaattacagtgcaaacggaacatttatcccgaagcaggaaatgaaccagtcttctgaaatttcaggacgcgtggtaagcgttttggtaaaagaaggctcaagagtgggagcaggacaggttttggcaaccattaaaagagatgccattgaagtagatgttactcaggctcagaacaatttacagaatgcgattgcagacaaccagcgttatgaaaatgccttcaaaacaggaggtgttaccaaacaacagcttgataattcaagattacagcttaaaaacgctcaggctgcgctaagagctcaaggcgtaaaagtaaacgatacaagcattcgtgcgggaatcagcggaaccatcaataaaaaaatggtagagccgggaatggtggttgctccggggacaggacttttcgaaatcgtaaacatcaacagcttaaaactttcagttttggttgatgaaagccagatcgggaaaattcagttgggacaggaagttccgattaaagtaaacgttctacccgaagattcatttgtgggaagaattacatttatcgcccctaaaagtgatgcttctttaaatttccctgttgaaattgaagttcagaacagaggaaacctgaaagctgggatgtatgcaacagcaacatttaaaacaaacaatggcgcagaaacacagaatatgttaacagttccagcggaagcatttgtaaacggagtaagttccggacaattatttgttgtacagaatggcgttgcaaaactcatcaaagtaaccgttggaaaagtatatggcgataaagttcaggttttaagcggattgaatggcggagaacaggtagttacaagcggacagatcaatctggataacggatctaaagtaaatatcgtaaagtagaagatttatgaagttagcagaaatatcgattaaaagaccttcgttggtaatcgtactgtttacgattcttacgttgggaggtatcctgagttacacactcatgggatacgagttgattccgaagtttgaaaccaatatggtaaccatttctacggtgtatccgggagcttcccctgcagaggtggaaacatctgttacccgaaaaattgaagacgccgttggttctttggaaaacgtgaagaaagtggaatcttcttcctatgaaagtttatccgtaattatggttcagttgaatgacggagccgatgtagattatgcattgaatgatgctcagagaaaggtaaacgccattcttgcagaccttccggatgatgtggatgcaccgtctcttaacaaattctctctggatgatttaccgatcatcacgatgagtatttcatcagacaaattaaacaataaggagctctatgaccttttagataaaaaaattgagccgattttctcccgtgtaaacggtgtcgcacaagtagaccttgtaggtggacaggaaagagaaattcaagtgaatcttgacgagaaaaaactgcagggttacggactttccattggagatgttcaacaggcaattctttcttcaaacttagatttcccgacaggaagtctgaaaacgagaacctcaaaatctacgatcagattatccggaaagtataaatctgtagcagaaatgaacaatcttgtggtttccaataaaaacggagcgcaggttcgtttgtctgatattgctacggttttcgattctcagaaagatgtggagaaagtagcgagattcaaccagtttcctaccatcttaatgcaggttaaaaaacaatctgatgccaatgcggttgcggtatctgaaagtgttgagaaaaccattgaaaccgttcaggaagcgtacaaagttcagggcataaaagtaaaagtggtaaacaatactacagactttacccttgagtctgccaaccacgtaattttcgacttattcttagcgattattttggtggcaattgtaatgttactattccttcacagcatcagaaacgcattcattgtaatggtttctatcccggcttcattggtggcaacattcatcggaatgaatttaatgggatatacgctgaatttgatgagtttactgggactttccctggtggtaggtattcttgtggatgacgcgatcgttgtattggaaaatatttaccgtcacatggagatggggaaaagcaaaatcagggcagcctacgacggagcttcggagatcgggtttaccgttgcagcgattactttggtaattgtggtggtattcttaccgattgcgatgagttcaggtttggtagcgaacattctggctcagttctgcgtcacggtggttattgcgacattgctttcattggtcgcatcatttaccatcattccgtggctttcttcaagatttggtaagcttgagcatttaacagggaaaaactggttcgaaaaattcatcctttggtttgaaggtttaattgataaattcacgcactggatcacaggaattcttgaatggtgtttaaaaaccacattaagaagaatttccacagtcgtaattactttcatcgttctgatttcttctttcatgttggtggcattcggattcatcggaggagaattcttcccgccgatcgacagagggcagttccttgttcagatggaattaccgaaagatgcaaccgttgaaaaaaccaatcagctgactttagatgttgagcgatttttaagaaatgacaaagatgttgtagatttaattacaacagtaggacagcagtcaacaggttttggtggagctcaggcgacaacttatcagtcggaagttcaggtaaatttaacagataaatccgagcgttctgaaagcaccaacattaaagctgcgaaaattaagagagctttagaagagaaatttacaggagtagaatttaaaactgccccaatcggaatcatgggtgctgaaaatgcaccgatcgaaatggtggtaaccgctccggacaatgcaaccgctgtaaaagaggcaacaagaatcttagaattgctgaaaaaagttccgggagcagtagatgcggaattatctacagactcaggaaatcctgaagttcaggtgaatatcgaccgagataaaatggcttctttaggcctgaatctttcaagtgtaggacagacgatgcaaactgcattcaacggaaatacagacgggaaattcagagcaggagagtacgagtatgacatcaatatccgtttcggagatgcgaacagacagtctattgatgatgttaaaaacttaatgtttacaaatcctcagggacaacaggtacgtctcagtcagtttgctgaggttaaaatgggatctggaccgagtttgcttgagcgtagagataaatcaccttctgtaaaagtaagagctaaagcagtaggtagacctgtaggagacgttgccaacgaatgggcaaaacagttcatggacagcaagagcaaacctgtaggagtagattacatctggagtggagatatggaaaaccagcaggaaggtttcggtacgttgggaatcgcattattggcggctattgtattggtttaccttgtaatggtttcattgtatgacagttttgtgtatcctttcgtggtattattctcaattcctctggcgatgatcggagtaatggtaattcttgccttaacagcaaattcactgaatatctttacgatgttggggatgatcatgttgattggtctggttgcgaagaatgcaattttgatcgttgactttgccaatgccagaaaagaagccggagccaatacacacgacgctctggtacaggcgaatcatgcacgtcttcgtccgatcctgatgacaacaatcgcgatgatcttcgggatgttgccgatcgcgttggcgacaggagcaggagcggagatgaacaaaggtttggcatgggtagttatcggtggtctaacatcgtctctattccttaccttaattattgtaccggtagtttactctttatttgattcaattctgagaaggatgggcaaacatgaaaaagtagattatgaagcggagatgaaagctgattatgagcacagagaactaagtgaagacggttttactccaaaacatttagactaatataacaccttaattaaccgaaaaccgtatcagcaatgatgcggtttttttatgtcattgcgaacagactgaagatctgcaaacgtagttctgatgcaacgaagcaatcttaaaaaagaaaagaaacatgattgctcatttgctgagtaaaacgcctttgcgaccgacaagtatgtttaataatttaaaaaagactaacgacccttttgcgttaaaattaaactttaatcaaaagtttatttaaactaattttaaatgtaaccgcaaaagagacaaaagactttgttgagtttatttaaagtatttcaaaagtctacaaagagaaaaatctttgattctttaacttatgtgctctttttacatttaagtattaaacttaataactaaagtgttacaatcttttgcatcttttgcggtaaaaaagtttagacaagtttcaaataaaaaaaagcttccaaaattaattgaaagctcttatttatttgtaaataggggattattccgccattgcctcaccggcttttctgtacacaaaacttccgtaaatatgtcttcttgcaaaacggctcggagaatcggaattcaccattttgatgtaggtatttttcggaactccaagatattcgtacatatttccgttcaggtgctgtactttaagaaccgatttttccagataaaaatcctgaatattagatttcgtaatggtttcggtatattcttctttgtatttttcctgcgtttccggattgatgctcaccaaaaaatgataggcttcaatcacagatttgcttttttcttccgcttcctgctttcctgcttcatcattgatgaatttatctggatgcgtatctttcatcgtattcctgtagatggttttcaattccttcagtgttacatttttatcaacttccagaagctttctgtattcgcctaattttttcataatggagggtacttatttcggggtgcaaaattaaggttttaaaatgtaaaaatcataacttattcagtattaatttattttatcctaaaaattaatattaagctaatctttgtgcttaattttatgtgttacttcacatataattactgatttcaattaaattcttatccggatctctgaaataaaccgattgtatttttcctaaagctccggttcgctcaacaattccttcgatgatatcaatattctttttctttagttcctgtaaaacttcgtgaatgtcggtttctgaaataaaacaaagatccgcagaaccgcaagtaggatattcagctttcggttcaaattcttttcctttttgatgaagattgattttctgatttccaaaagtcagtgcttttctgttttctccaaaaactacgacttcaaacccaagaatagaggtgtaaaaatctactgttttttcaatgtctgcaactgttaaaacgaggtgatctatattttttattttcatgtttttaaactaataacaaatattatctctaagatgctttaaattttaatcagaattattctccatgaaaatattcataagcaaacccctccaaatctccttcttcggaaattaaattattctcttcatcatatattttaaaactttgctgcgaatttcctatacttgcagagccgtcaagaccgagtaaaatagaataaaaagtatcagttaaaagatcagaaattacttctttgaatttttcagtttgttcaaagtctaaattaagctgttcaattttaacagaaacaagagttctgtattctgattcacgatcaaaacaagaattaagaatattctctttttcttgataaaaatttttaacaaattcttcggtggtcatcttatgaataacgcttttaaattagtgttatggttattagtcatccttcttactccgttctctggaaaatatgtgtcagtttagaattcttaataaaatcctgaatgggtgtatcttttgtagcatttttatccgttaattcaaaataatagatcatcagattcggaaacttcggatctttgcagaccactttaaaacgcttaatcttttcatcggtacttaaaaaagtcagctcagaaccaccactcagtttaatattattgacttcaaaagaatctttccagtttttctgaagttttgcaaatcttttctgcgttctgtcgctgtcttcgttttcgaatttatcaacctgaaattccgttaaaagctgaggataaatcaatccttctttaagcatcgtttcagtaattttatcagattgatcaaataaaatcgttttatcgtcgaattttgctgtattgtcctgcaaaacaatggttccggcaaattttctgtaattttttttcttgtaatcgtttttaaaatgttcggttaccgctttgtctttcggtcctgccttttcagttttctgccccaaaacattcatggacagcagcaaagaaagacttaatgagaatatagttttcataatttttttacttctgatattttctattaacttgtttaaactatttaagaattaaccacaaaaggcacaaaaaacaatgttaaggcgaatttctataataaccaaagtactcaaaaagaataaaaatcaaagattttaaaaaactattgtgccctttttgatttgtaatgatcaactttaaataaaagtttagttcatcttttgtgacttttgcggttagataaaaagtttaaacagacttattgtaataaattttttaaagcatctttcagatccggaaattcaaactgaaaacctgctttctgaattttttccgatgaagctctcgaaccttccagtaaagcctcagaaagttctccaaacatcagttttaaaacaaaagcgggaacattaggcataaatagaggtttttgaagcacttccgccattttttttgtcagattctcattcgttgtatgttgcggcgaattcgcattgaatgctccatccagttcagtattttttaaagcaaattcgtaaatcgaacaaatatcattgatatgaatccaaggcatatattgttttccggttccgataggcgagccgatgcccatttttacaggtggaagcattttttttaaagcgccgtctttttccgaaagcaccactgcagtacggattttcacgactctttcagcaacattttgttccttaaaatcatccgcagctttttcccacagaactaccacttcacttaaaaaatcatttcccggaccatcattttcagtaaaaattctttccgttgttttggttccataataattgattcctgaggcagaaatgaaggattttaatttgatattatttttttgcagagtttttaaaagcaaacctgcagaatctacacgactggaaatcagttctttttttctttcatcagtccatcttttctccgaaatattggctcccgcaagatgaatgatatgcgaaacattctcaaaagctttttcgtcgatcgtcgcttttttaatatcccattcaaaatcgttgctgttctgtttttttcgcgtaagaaaacgtaccgtataatctctttcaagttttttagataattctttggcaaccaatccatttgcacctgtgataagaacaatttctttcatgtttaaaaatctttgtagtttttatgcctgattttttacgatcagaacaaaatcatcttccagaagtttatagccgtaatcgtaaataaatttatattcggagccgtttttataaactttcagatttgtgaaataatcgaaatcaaaacctaagccatcgagcttagatttggcaacttttgtttttccgtcagtatttacttccgtcagaattctgtagtttttgcggagcttgttattgatgttccgcatcagattgctggaatccttgttctgtttgttgttgtaggcgtttcggcaggcatcattacagaattttttgtcggatctgccgataattttttcgccgcattcgagacaattcatacttttttcattttgtgtggatgtttatgttttttcttcagtaaatatgtaaacctgttatgattcggatagcttctgttggaagttatgttgttgaaaattaaagcaataatcaataagatgatgcatcctgaaagaacaggagaaagaacataccaatatcccagttccggaattttcccagtcgaacttaccgcaataagcgcagtagctccgccgggcggatgcagcgttttcgtgtactgcattaatacgatggaaaaagcaacagctaaaggtgcggaaagccagataatatccggaacgattttatagattgttactcctactaaagctgacagaacgtgtcctccgattaaatttctcggttgcgcaagagggctttgaatggctccgtaaattaaaacgctcgaagctccgaaagaaccgattaaaaagatattttctgtagcagacaatgtgtgtgactggatgaaagcaatcattccaattccgaaaaatgctcccagaaacgaccagaaatgttctttatagtctaccagagtttctctgtaaatcacatatttagaaacacgaaacgttctttttattgtcttcttcatagcatttcaaagatacaaaattatccgtttgcaaacgactacaaacgaatttaaatagttttctaccgactccggttctgaaattcagcaacctttgccacagagatttgagaaaaagataacgtctcttatcagaatgttaaatctaaaaaatataaagttatgtcactaagaaacaaagttaccctaatcggatttacaggaaaagaagtagaaatcatcagcttcgaaaacggaaatgtaaaagcagccgtttctcttgcaacgacagatcattacaccaacgcaaaaggtgaaaaagtagaagaaacacaatggcacaatctggtagctttcggaaaaacggctgaaatattccagaaatacgttccgaaaggaaaagaagttgcggtggaaggaaagcttacttacagatcgtatgatgataaagatggtgtaaaaagatacatcacggaaattcgtgtggatgaaattcttttgttgggaggaaaataatctaaaaatcacaagccatgaaaataaaagtttttaaaatcggactggacgacagacatcttgagaaagatcagaaaacacttgaagcttttctggaatcccacgatattataaaagtagaaaccgctttcgttcaggacgaaaaatactggtcggttgttctgtattttgatgaactgaaaatcgttcagcaaaatgttgtaaaagattctaaaacggcaaaatactccgcagaagatgaagccttaaataatgatgaattaaaaatactggaagcactgaaatactggcgttccgaaaaagcaaaagaacagaacttaccaagctattttatcgcttccaataaagaactgatgcctgtagccaaatataagcctgcaaaaaaagaggaattgcgcgatatcaaaggtttcggaaaacacaaaatagaaaattacggtgaagaaattctggaaatattggaaagtatatgatcttcatgtatttttaagtattttcaaacctcacaggttttttaaaacctgtgaggtttagtattattttctgataaagtttaaacgggtttatgtgtagtaaaagtcctttcaattccttatttttgcagtttatacatattaatatcatttatctattataaaatgaaaccaagtttagcaaaagggacgagagattttacggcactggaagttgcaagaagaagatatatcattaatattttactgaaaaacttcgagttattcggatttcagccattggaaacaccgagttttgaaaatctttcaacattaacgggaaaatacggagaggaaggagatcgcctgatttttaaaattttaaattcgggagactacacttccaaagtaaatcaggaagattgggaaaataagaatcatcaaaaactgacttctcaaatttcagacaaagcccttcgttatgaccttacggtaccttttgcaagatttgtggcaatgaatcataatcagcttacttttccttttaaaaggtatcagattcaaccggtttggagagcggatcgccctcaaaaaggaagattcagagagttttaccagtgcgatgcggatattgtaggaagcgaaagtcttttgcaggaagtagatctggttcagttgtatctgaaatcttttgcggagctaggagtttctgtaaccatccacatcaacaaccgtaagattctttccggattggcagaatttgccggaattaccgataaattaatagatttcacggtagctttggataaattagacaaaatcggtaaagatggtgttgtaaaagaattactggaaagaggaattgcacaggaatccattgacaaactggatttccttttcaaccagtcggatgatgcgctggaaaatcttcttaagttaaaagaaaagttcacaggaaatgaaacaggattgaaaggtgtagaagagcttgaatttgtgattacacaatctttaaatcttggagttgatattcagaatcttgtttttgacattactttggcaagaggtctggattattatactggagcgattttcgaagtaaaagcagttgaagttcagatgggttccattggcggcggcggaagatatgataatcttacggaagtttttggtgttaaaaatattccgggaatcggaatttcttttggtctggacagaatttatctcgtgatggaagaactcggacttttccctgaagaagctacctctaaagtagaatttctttttgccaatttcggaggaaatgaaacggtagaagccctaaaactgatcagacaattgagagaaaaaggaatttccgcagaaatgtatccagaagcggcaaagatcggtaaacagttcacctatgcggagaaaaaaggaattaaaaatctcgtattcttaggcgaagaagaaattaaaaacggaacggtaacctataaagaccttgaagcaggagaacagaaaacggtttctctggaagagtttttgggataaaattaaaatcagaaaactaaaaagcatcattaatcctgatgcttttttattttcagttggtacgatttagttacaaatttgtattttagaaaatcataaattgttttatacttttttgaatatccgttaaacaacctattactatgcactgatatgaaaatcaattatttataacaggcacttcgacaagctcagtgtggcacctctaatactaaacgcttgatttttagcgatgtcaagctgagcctgtcgaagctttaggttaataaacggacaatcaaatatacttttttaaacttttaaacatgaaaatcaaatgaataatatttgtggattgtgcggaacgcctttaacatctatggatacgcttttgggcgaaaataaactggcggacaatcatattctctgtaacaaatgcctgaatgaggcttccaatatcaataaggatgttgtcaataatctgcagcagtttttcctgcccgaaatcagggggattattttgcagggaaaaattggcgaaactgaaaattttggatcgtcacagacttcaaactttcagagtcccgaaacaccgtcttttggatttggaggaacagtgaccagacttgatgatattcaggatcagattgttgccctgaatgcgaggttgagtatttttgtaaacagcgaagtaaaggaactcgttcatattttagaaaataatgaaaagttaaccgctattgcagaaggtcttaccatacctgcaaaagtggaaggtcttttattttctacgcagagaagagttgtttttattgataaaaaactttttggaaatgtgcaaaaagacgaatatctcttcgaaaatatccgttctgtagatcatgtggaaagtcttttgtattcaaccctgaaaattttctctaagaacggttccgcggcagaatttaagcttcataataaaaatgacggaaagaatttctgcaatgcggttaatcaatatctgaatggtacgatcagtcactctgcttcacaacaacaacaacaacaacaacaacaacaacaaattcagtcttcgtcttttaatttgtacaatatgccggtttctgagaatccgtttcaaaagcctgccgatttaaatccggtacagcaaaattccggtgtaccaaaagaagcacctgaagttatttttgaacagttggaaaaacttggaaaacttcgggaaatgggcgttctgacggatcaggaatttacggaacagaagaaaaaattattagaccgactttaatctctgtttttttagctaaaaacttttgaaaaactaatttcggaattaaccgcaaaagggacaaaagataatattaaagcgaatttccagaataatcaaagcgttcaaaagaataaaaatcaaagatttttaaaaacgatggtgagctttttttatttatcatgatcaactttaaataaaaaattgagtagatcttttgcgtttaaataaaagttcaaacagactttaaatcaaaaattaaaaacgggttaaatataataatacatgacaatgaacgatcattgcggattgtgtggaaaaaaactgacttcaatcgacacgatgttgggcgaaaataaactgtctgacggaaatatcatctgtaattcatgccttgaaaaagcgagtgcgatgaacgaagaactgctttcggatcttcatcgcttcagcttaaaagatcttgaaaatctcctccaaaacggagaaattgctcaagaggaaacagttcaggaaaatattgacgaaaatttaccttcaatagcagattcagaacagaatgcgctttcaaaagatctttataaaaaaagattgaaagagataaaaaagcaactggaaagtttaagagccaatctttctctgtttacaaaaggagaaattaaagagcttccgtatgttcttgattctgatgaaaaaattttagcgattatagatgctcagttcgccaaaactacggatgcgggaattttactcgttacgcccaaaagaatcatttcggtttccaaagcgatgttttctccggcaaaagtgaatgaatttctcaatgataatattcttgaagtaagcttcgtaaaaaactttgtgtcgccgaacatcagaattcatacaaaagaaaaaacggttgagtttgaatcgttcttcaataaagattatgctgaagatttttaccatttcatcagtaaaatttataacaaagaagcttccaaagccttatctccggagcagaatactgtttccgaaagcgttctggaacagctcgaaaaattaggacaactgagagaaaacggtattttaacagaggaagaatttacatcacaaaagaaaaaactattagaaaaactatgataaaagcaattttttttaaaatattcaacggaaaatggtctgcaccgttttttatttcatgtgtcggtattttttgctggatatggatgcttattttgccggtaaataagattatctggaatttgtgcttcataacgccgataatggttgctttggggtatattattttaggaatatcaaaaatttttaagaaaagattcaaagaaggtcttgtacagatcgttctttcggtcgtatttatgtttattacggctgttttctttacggttctgcttcccaaaagtccttacaaagaatacaaaggagatatttacaaccccaataatatgaaagtagatatgcctttaaaactatcttttagtgacgaaaaaccattatttaaagtcgataaaccggaggtgatcctttatgattataatcagcccggaacctataaatatcaggttttccttaataaaattgaaaaaggaactgtttatctgaaaatgtttgatcttaccaccaacagaattttatctgaaaaagaaattgcaaaagatactaaagtgaaagtggaaaatcctagtgatgaactgaaagaattccctctgagtaaacagtttaacgtacaggagggagattggggagattattacggaagcagggtggaagtatggtttaagccggaagatgcttcacagcctgaaagaaagcttttggttaaaaactatgtgattcagggttggtaattttaatattttaaagctgattaagaaaactgttttaaactaatttcagaattaaccgcaaaagggacataagactttagtggatgtatgtaaagtatttcaaaagtctgcaaagaaaaaaaatctttgatgttttcaacttatctgctctttttctatttaggtattaaacttaaataactcaagtatttaaatcttttgcatcttttgtggtaaaaaagtttaaacaggtttatcaataaaactaaaaaacaatggaaaattatttagaaatcaataaaaattcatggaatgccaaagtagaacctcatctcaaatccgatttctattttgtcgatgaatttttgcagggaagaacttcgttaaattcaattgaattagatcttttaggagatgtaaaaggtaaaactattcttcatttgcagtgtcatttcgggcaggattctatttcgctgtcgagaatgggcgcaaaagttacgggaatcgatttgtcggataaagccattgcggcggcaaaagatctggctcagaaagcaggaaccgatacagaatttctctgcacagatctgtacagtcttcccgatgttctcgatcataaattcgatattgtttttacaagctacggaacaatcggctggcttcccgatttgggagagtgggcaaaagtgattaaccactttctgaaaccagaaggaaaattcatcatggcagaatttcatcctgtagtctggatgtacgatgacgatttcaaaggcgtacaatacaactatttcaacgaaaaaccgattgtggaaacctatgaaggaacttatgcagatcagtccgcagatatcgttcaggattatgtgatgtggaaccattctctggcggaagttcttcagaatttaatgaatcaggatcttcagatcaaaaagtttcaggaattcgactggtcgccgtatccatgtttcaggcatgttgaagaatttgaaaaaggaaaatggagaattcctcagttcggaaataaaattcctttggtttttgccattgaagcacaaaaaaagtcatcgtaataaaaactacgatgactttcctgtatatatgaatgttaaaataaactatttatggtctagcttaccgcttcctgagctttatttttaagatcttccgctttatcctgagcctgagaagctacgtcatttgctttatcttttacctgcgaagcaacgttgttggctttatccttaagatcatttccccatttgtttaggttgtcttttgcagtgttgatcttatctttcaccatttgcttatcttcttcagaagaatttttgtatttccagtatgcaagtgctcctaatcctaataacgctaataagccttttgtcttatttcccatgatttctatttttttaagttaatattaaagtttgatgttagtaatcatgtaaaatttgtgccaaaaaaataaacagacttataaaataatgttaaatttaattgaaaacttcataattttctccgtcaaaacttgcaaaaaccatagtaggataagaatcttggtggtatatatttccgtttttatcaatagcaatcgcacctgcaaagccatcgatggtttttaattcgtcgaaagtttttgtaaacgcttcttttatcgtcatgccatcggtaacccgggttacaattttcgttgcagtggcattgcttacaatatcttcacccactccggtacagcttaccgcacagaaagaattcgcataatttccggcaacagtagccgaatcggatatccttcccgggatttcaaaaccttttcctccggtagaagtggcaacggctaattttccgtccttatcaatcgctacacagcctaccgttccttttccgccattttcaagtttcgcttcatattcttttctcctttgcggaatttcggttgaaaaattctcgaaaccatgttctgtagcataatttttggcgccgcttcctcccaaaacccggtcatcttccttcatcagttctttcgctacaaaaacgggattcttcacatcctgaatattaataactccgcttaatttctgcgttgctccatccataatcgctgcactcatcctgattacgccatcgctttggatctgcgaaccgattcctgcattgtaaagctcatcatcttccagcaaagaaacagcgtaagcagccgtatcaaatgccgagttggtttttaaataatcgaatgctttctgagcaatgctttttaatgaattctgtttggctgtttttacttcgtggctctggtcgctttccgagaaaaatccgccgtggatgattattttcatatattctgatgtcgtttataatttatttggagcttactcccgctatccactgtatcttttgggttacggactccgcttcgctccgtccgcaacccaaaaggatgccgtttctatcggggctaagattttcctgcatatttcaatcgttcactgtgcttttcactggtcacgaatctcatttatattgcaatcctgagattctttctatccacgataaaattaagcatcaatccttattaaaaatcttggattttcctgcgccttaaagatttgagacgaataaaaatcttgtgtctttgtgttttccaacaagaatattttatttaaaaaagttcgttgtaaatatctaaaattgtcacaggaacaattcaccatttaccattcacattctacttttcctgcgggatcggattaaactgagaattctcaatcgtcagcgctttagtcgtaagatcataatgatcgttcatcgacattacgtgaaccgttaaattatcaatagaaataggctctccaagattaatatttgtaagattggtgtctttaataaaccttccgtccaccagaattaccagtcccgaacctaccgcagtcatcacatcattgtggatgaacaatccggtatcttctcccagaccgattcccagagttctcggattgtttaccaccgcctgaaaaagtcttccgattcttcctctctgtacaaaatgcgtatcaataatcacattatcaatcagtcctaaaccctgagtggttttaatttctcctttcagcaaagcttcggaactgcttccctgataaatcatattctccgatgccgcagcggctccggcagaagttcctgagtagatgaaatcctgttcctgatatttcagtaaaatggtatcgtgaaaccttgttccgccaagaattgaagtcagtctcaactgatctccacctgtaaacattaccacatctgcagcattggctctcgcaacaatcgcatcagaattcgcttcctcacggttatgaatatcaaggatgtttacatttttagcgcctaaaaactcgaaggcttttttatattcggaacctacaatttgcggaatctgagaggcagtggtgataatctcaataacggaattctctttcaatttagattcattaataatctttcgaagaattcctctctcaaaaaaattcaggtttttttctacactttgatcaaaatcggtttctgcaaaacttcctttgtttacagcacctccgataacaattaattttccaacaggtttcatcatagggtgcaaatttaaaaaataattaacatttgggaaaggattaagagggattgataattaataagtgaaaataaaatttaaaaagcaggtatgagaagtgattgtgagaatatttaagttttacaaaaattaaaattgaagccttttttaagctatcgtgatctttttcttttataatcagtattttgaacaaaagtttaactcatctttttgttatttttgtggttgtgtaaaagaatagagttattttttaataaaagttcagccaatttctgtctttaatcccatcaaataaaaacaatgacgaattgttaattgcagccattgagccgaatcttaaattcaatatacatttaacacagtaaatttctaaaccagatcaccaatgtttcaccctcatcatttattaaagtccctgtttttattcttaagttttttctcccatgcccagatttccgtaagcggaaatttttctatgaaacctgattcttatgaagccatggttattgacagcagttatcagaatatttactacaaagcagaatttgttaaagatcccaaaaagaaaaagctggaaacaacctgtgttttgcagataggaaagaaattttctaaattttcagattttaatgtattgcgcaaagattctttaatggaaaaatacagtcatttggagaaaataggagctaaagaattaggccagtcccttaatttagcggaaaaatggagaagtattttaattaaaaattttcaggaaaataacattacggtacaggataaaacaaatattacgtaccaatatgaagaaaaacagcccgctctcgattggaaacttgaaaacgagaccagagaaatccttgggtatatatgccataaagccactacgaagtataggggaagaaaatatacagcatggtattgcaaagaaattcctattaacaacgggccttatatttttcagaatcttcccggtttaattttagaattggaagacagcgacaataattttcattttacagccattgcgatggataaaaagataaatgcggtctatctgagaaatgaaaaaagaattcttcatataacccgagagcagtttagaaaagcattgcaaacgtatcatgacaatcccggcttttttcatggaaaagcgtataacgaagatggtagccagatcgctgtaaaatctcctcctcttccgtataatcccatcgaattggaataagtttcagcggaggataaaaggtattgtctctacagaaaacagcagttttccaagcgtaaaaacagattgatctttctgaaatagatttcagcttaaaggtaaacgcaattcatcccacagagaccagcattttgatggacgaaaaaccctgttgacctttgtgtgcaggcattttgtccggagtctccaaataattaccctgcaaaccaaaggttttgacctgatgaaaaatctcattcactctagtttagaagttattcaataaataattaacttattgacttatctcttttactaataaacgtttcgacatgttcaggctgacgatgtttaaacattgcggttggtattcgaggtgtcatcctgagcttggcgaaggctctctgttagaaaacgcttgctaatttttaatcctatgaagaacaaattttttctaatccatattttttatttgcttacaatgagtaaggatgattctctttgtcagacactattattgattagttttcaatgatttggagatatactgaaaaagtgaaataaatataattattgaaaaatatgtttaactatatattgaatttataataaaaattattatattagtattaaattaaaaaccaataaccatgtatatcaaacaggaagaatatcttccgctggcaaaagaccttatcgccagtttcagcagagaccttttgctttttgcagaggaagatcacaattatacgcaggcatataaagatgcttttcagtcgaaaattacagaagtagagcagaaagaagccagtaatacagctttggtgcagcagaaacaggcaacgcaggcactttatcttttaggagaagacctgaagaaacctcttaaaagtctgcggatacgcattgaaagagcaggaattcccactaacctcaccacacagattctgacggatattaagaaacgtaattttgaaggagtaggcagcaagcttacagatcttatttcattagtcaatgcccatcttacgcttttacaggataaaggaatgaaaagtacgatacctcaggatttgcaggattttcaactggctattgccgcaaaagccgattagcagacgcagttaatgaaaaaggtagcaggaatcatcggcactcaaaaagaactctacgacggcttatacaaatatatttctgagatctgcgaagatggcaaattaatcttcgaaggacagcagaaagccgatgaatatatcatcaaaagaatgctcgccaagctcacgtggataaggtaaagagcggggaggggaagataaattcttagatgtttttagtttgtattggtgcaatgcgctgatgcaaatgttagtggcgagctattcgcaacaaacctataacattaattgacttcaatatatttgacacctaaaaatcctaaatcatgagatacaattttctatttgcatttgtacttgtttgtcaactaagtttcagtcaaacatatgttgatcaaaaaacctttgaaaatttaaatgacatcaaagtcctgtcgaccgagattgttgagagttcaaatgctaatcaattaactactttgaaattcaagtttgtcgatttttctgacaaaaaaataaaattttacgaagcagagttaaaaaaaaatgaatttgtgagcattaaaagtaacaggtattttccgagttctttaacagccatttcggtaatgacagtaccattcaaagtgagggctaaaaatcggcaaggatatgtgacagcacaagctgatgttaagaacattggactctattttcccgttgcattatgggatagaaaaagatattggttagacaattctacaagtagtcacaagttttcgataggctttatggttgcacctatggcacaagaacttagcgacaagaatacaaactcttttttccaaaataccaatacatcttataatgctttcatgctctcaacatcattggcagtcacatacacttataaaaacataacgattgctattatccctcttggcttcgactttggattagaccaagctggaagtcattgggacaatcatcgaaaatattgggcgggaattggtattggcattgacacaaaactattcggattttaagcccgcagctagcactagttttgtgttcgtagatgcatttcatcttctccaagttaaaccgttcttgcgaaatgaataaacggtagcttcttagaatatttacctttgctgaaattggtgaaaaatgaagatgacagcaaattggagagctgcacttactatcggaattctttctggcgtttttggtgatagatttatcgaggcaattaaagtattaaactaatattgagtgtcaaaatatcacataacatcacatacccacaagtgacttttatttgttaaatcaagtttttacttctgttaaactatgtttagcagaaagtaattgtttcgaaatcgcaatctttggttactttatatgatgttgtccaaatcgtattgtataatttaaaaattttattatggaactaaatgacttagcattatggggaacttttttatctggattgggcgcattagccgcattggttatttcattaactcagataaaaaaagatgcgaattttaatgaagcaaatttttggcttacacttagagaactttttcatcagcaagacaggagatgtgtacacaatgattttagagaaggaaggtggcagacaataaaaccaacagaaattgatgattggataaaaattgaagattatttaggactatttgaaatctgtgaaagaatgttagagcgaaaaattataaacgaaaaaatgtttcgtagtttatatgagtaccgtgtttataattttttaaaaaactcagaagtggctaaatgcaagcttatatatgagcattatgattggacttatttatataaacttttaaacagactttatggagaccattgggaagaaatgcgacggtttttaacaagcttagaaatagactataatgaaatagattctgaatcgcaattgctagctaaattaaaaaaaagtgaaaaggaaaagtttaaaaaattaagagagaaaacaaaaatctaaaatactatagttaacaaactatccaaatgatggaattttatgatattttattacccaatagaattagtactatgttgagaaaacataaattcctcatcaagctatcgaaaatcaatatcaaaccaatttttcctttttaactgaaaaaacatatatctccattatgcagtaacaattatgacggaagaattgactttatcacagcttcgttttttgacattagaaagtcagggattagcaaaaccatatccttttggaaaaggtaaaaatgcagttcttcaggcattagaacatcttggatatttacaaattgatactttatcagttgttgaaagagctcatcatcatacactttggacaagaataccggattataaagcagaatatttagatgaattggttgaagaacataaaatatttgaatactggtttcacgctgcgtcatatcttcccataaaggattttcggtttgcattgcctcaaatgacagaggtgaaacaaagcaaaacgcattattataatgcagacccaaaagtgatgaaatacgttttggatacgattcgtggagaaggtcctaaaagagcaagggattttgaaaatgaaaccaaaaaagcgggaagctggtggagctggaaacctacaaaaatagctcttgaaagactttttttgcaaggtgatgtaatgattacaggcagaaagggaatgcaaaaaacgtatgaccttactgaaaatgttttaccgaacacgattaatacaaccttaccaactgaactcgaatttgctgaatatttagtaaaaacctatttaaaagcctacggatttaccacagtaaagcaaattacccatcttaaaacaggagaattaatacggaaaaatgttgacatcgtcttaaaatcaatgcttcaggaaggaaccataaaacaagtaaatattgaaaatatgccttctgtttttttgaatgaaagtttacttgaaaattcgttaaacaaaaccagttcagacattcatattttatcgccatttgacaattcagttattcatcgggaccgaataaaacagttttttaattttgattataagattgaatgttacacaccaaaagagaaaaggcaatacggttatttctgtttacctgtattatttggcgacacctttataggacggttggattgtaaagcgcacagaaaagaaaaagaatttgaaatcatccatttgcatattgaaaatacaagtattgacagtgaattatggaaagaatcgtttgtagagaggatgaaatcttttgcctcttttaatggttgtaatatcattaaactgacaaaagttagtccatcaaaattcacaaataaaataagaccattattctgattaaatcatcgattataaaacagctatgaatctgaaaaaaagaggaagtataaagtatgagtttactacaaaaatgtggcggtcctccggaaaaggcgggnnnnnnnnnnnnnnnnnnnnnnnnnnnnnnnnnnnnnnnnnnnnnnnnnnnnnnnnnnnnnnnnnnnnnnnnnnnnnnnnnnnnnnnnnnnnnnnnnnnntctggtttgactccaaacacgaaacgtacttactgccattaaaggcagagatacgaaaaaaagaaaagcttgaaaccggtaaagacatacaaacgattctatggatttaaaaacagaatcgtttttctataattatcttatggcagattggttcagctattaaacgtttttagaatatctttatttaattttttaaagaaactttaaactcattttaaatttaaccgcgaaagagacaaaagactttatcggatttatttaaagtatttcaaaagtctgcaaagagaaaaaatctttgatttttttttaaacttatctgctctttcttttcatttaaggattaaacttaaacaactaaagtgttacaatcttttgcggtaaaaaagtttaaatgtaaatagctaacataaaacggttgttactaatccttattaaacaatctttaatggcggcagacattcaaccaggtttcaattgtattaatctttattcccgagattttaaaaattttaatattttttattcattttttaataaatgtttaactgtggtatagtttcgtttcgggttttacattatctttgaataaatggagttattgttaactattaaaaaaatgcaaatagactatgaaaattgagaagatacaggcgttacggggaccaaacatctggagcatcagaagaaagaagctgatacagatgagattggatctcgaagaaatggaaaatttcccaaccaataaaattgacggtttcagagaaagaatagaaaaactgattccctctttgttctctcacagatgttccgaaggagtagaaggcggtttttttcaccgtatcgaaacgggaacatggatgggacacgttattgagcatatcgcgttggaaatccagactttagccggaatggacgtcggtttcggaagaacgcgcgaaacaaaaactccgggagtgtataatgtcgtattcaactatatcgaagaaaatgcaggaatttacgcagccgaagagtcggtgaaaattgctgaagctttaataaaaggggaagagtacgacttgaatgcctgtataaaaaaactaaaagaaataagggaaagagtgcgtctcggtccttctacaggaagtatcgtggaagaagccgtttcccgaagaattccatggatccgtctgggaaccaactctttggttcagttagggtatggcgtgaatcagcagagatttcaggcgactattacaggaaatacaagttcaatcgcggtagatattgcctgtaataaagaattaaccaaaaaaatgctccatgatgcggcaattccggttcctatcggagatttggtggttgatgaagaaggactgaacagtgttattagaaaaattggctatcctgtcgttatcaaaccactggacggaaaccacggaaaaggctcttcaattaatgtaaacgactgggaatcggcgaaaataggtctggaacacgctcagaaatactcaagaaaagttattgttgaaaaatatattacaggatatgatttcagagttttggtcatcaacaataaaatggttgccgctgcaagaagagtcccggctcacgttgtaggagatggagaactgaatcttcagcaattaattgataaagaaaataaagatccgagaagaggatacggacacgaaaatgtgttaactgaaatcctgatcgataaagatacaactgaacttcttgaaaagcttcagtacactctggaaacggttccgcagaaaggagaaatcgtttatctgaaatcaactgccaatctttctacaggaggaacctccatagatgttaccgatatggtacatccggaaaacattaccatggctgaaaggatttcaaaaatcatcggtcttgatgtctgcggaattgatattatggctgaaaatttaacccagcctttaaaagaaagcggaggtgccatcattgaagtaaatgcagctcccggattcagaatgcacttggctccaagtgaagggttgccgagaaacgttgcggctcccgtcgtagatatgctgtatccacagggaaaaccttttacgatcccaattattgcggtaacgggaaccaatggtaaaacaaccacaacaagactaatttcgcatattgttaaaagcaacggttacagagtaggtttcaccacatcggacggaatttatattcaaaacacgatgttaacgaaaggagatacaacaggacctctttccgctgaatttatcctgaaagatcctacggttgaatttgccgttctggaaactgcaagaggcggaatcttacgttccggtttaggattttctcagtgtgacatcggtgttttaaccaatatcaaggaagaccatttggggatgaacgatattcataacctgaaagatcttacccgggtaaaaagggtagtgctggacagcgtaaagaaaaacggatggagtgtgatgaatgccgatgacgaatattccatgagaatcgtgaatgatcttcattccaatattgctattttcagtatggatgaaaacaatccgcacatcaaaaaattcgctaaagaaggtaaaattacctgtgtatatgaagaaggttttgtaaccattaaaaagggagactggaagatcaggatcggaaaggcaaaagatttcccgatcacgatggaaggaaaggctaaattcatgatcgaaaatgtcttggcagcaagtctggcatcttatctttatggtttcggaatcgaagatatttcgaattctttaagaacatttataccaagcgcacagcttactccgggaagattgaacgtatttaaattcaaaagctttaaagtgctgatcgattttgcgcataatcctgcaggatatgaagcaattgaagattatcttaaaaacgttgaagcaacgaagaagatcggaattatttccggggtaggagacagaagagataacgacattaaagaatgcgggaaaattgccggaagaatgttcgatcatattatcatccgaaacgagaaacatcttcgcggaagaaccgaggatgaaatcaacggcttaattatcgaaggaatgcagtcttccggaagagatgtaagctatgagattataccaaaagaaattgaagccctgaaacacgccatgggaatggcagaagaaggaaccttcattaccgctttaagcgatgtgatttcgaatgcgattgatctggttcaggaatatcaggcgagagaattgcttgaagatgataaaatataatcatactatgatttaaaagtttcggcggcatcgaagatgccgccgaaattatatcttgaagtcaaaaacaattattgagtaacttttagaattccgtaatttttaggttcaattttttcattaaaagtatcataagaatctgctctccattgattttcgtgatatataaatgataaaaattcaacccagtatttatttctttggaaattgatttgcagattgtctccatcttttggttcatagtcaaaatcaaaacagtttttattattgagttgatccagtacaaactcttcagtaaggaattgaccaatctttccacttggcatatttaaaagtcccataataccagtattgtctttaaaactggcaaattcatataaaatccagctaaatggttccttggattgcggcagttttttattgtgaaacttttctaatctcttatgaatatttattaattcatgatctttaatttccagacaagtacagaatttcaaattatcactaacttcacacatctttcgtcttaatatctattcctccgcaaaaaaagcattcgaacttccgatccagatcgcatcctttttattgaaatctacatttaccatggctgctttcgtcattctgcctagattttctagtagaataggacgttcgtcgttttcgcgccaaatgtataataatctgatctctgcttttgaaaattcaccgttgatatcttcgaaaataggttcataagttacttttctctgcaaaatatagttttctttatcctcaatagcatcagtaatttcctttgtcggatttaaattgactccgcttcctgcaaaagaaaataaaggttttaaaacgaaattttcaaggttttcactttccgggaattcatgcagaaaatagcttttcggaacaaactgatgctgtaaaagcggaaggagaaatttagaaattttaaaaaaccagttcggatgcgtaacccacgttacatcaacatcttcacggaaatcaaattcggttttcagatccggaatcctgtctaattcgtcgaaaataacacggttgtaaatccttctgatttccgttaattttccatcgttttcatagaataattttcttccgtcttttttcactttggttaaacaaaccgtttttattcccagtaatttttcagtcagaacaaaatcaatggcagttttttgcttttcaggataaatttcaagaagaattacattttcgggattttcatctcccagaagtaaatcctttatgtaatttttaaaatcatcatgaggcattttattttgcagcttcgaaagaaaagggtagacatcacagaatgtctgctcaaaaaccttttgaaatgcatacaaagaagggaaagcctgaagttcgatcaactgaggttcaatctcgccgttttcactcttgcagatcccgaaatctatggtgaaaaagtgaggttgcttcgtgtcattggaaactctgcagttatcaggaatcgctttttgtagagtttcttcaggaagattcttaatctggctgataatactctcgctggcgtcaataagtttagattcaaattcttttgttaaaaataaaggactttcggaaattctgaatccggtttccagaccacttttctgttctaaaatttctttaaactgattgtatttttcctgagaaaattcctgattaaattgctttctgtattttggaatcataattctttttctttttgtgatttaaaaaatcggacagtttctgtgtccgatttttgtattgatattttcgttttattaaaaatttaagccattgcttctgcctgcttcaaaacgtttttttttgcaaactgtaagaatctcggcagaatctgagcctgagtaaggatgattttatcttcatcatccattctgtccacggtttcaagatacttttccattccgaaattttcaatcatcgcctgcttgttcttttcgtctttcagattttcaatcatgcctgcaggatttgcttccggatgaaactgtgttccgaatatttcctccgaaaaacggattgccatcaccgctctttccagattgatgtgtggacggaatttttcaatagccacgattttcatacccagctcctcaaaacggtcatgatccggctcaataaactgatacgctctggaatctactgcatagaaaggatcgggaaggtttttaaataaaaattcctgttctgcttcttcggttttatgaaccggcattactccgaaagaatacgatttccttttgcagatatttccaagcttccagtggatacttgccaactgaaaagaatgacagatcagaaacagatattttttgtcgtcgctgtactggttatggtcaaaaacattatccagaaactgagcaaatttatcttcccattcaagaccttctctgtgcggatctcccggacctcccgaagaaataaaaatatcgaaatcctctacattgggcatttcattcttaaatcttacatcaaatgtttcaatgcttacgttttcctgagcacagcttagcttaaatgcttcagaaatttctttaatatttttaaaaccctgattcacatgattgttgttcatgtccagcaaagcaattcgaatatcattcatacgacttcatattttttacaaagttaccaaaaaaattatgaagcagtttctccgtgtgtgatgccatactctgtttctgagatcatataatcaacaactttggtaaggtctccggtttcattgaagactttaagctgtcggtctgctccggttccgttttcaagaattgtccatgcgtattccacctcttttctgcatcctaattcgtccaccacatcatcaataaactcaagaagttcctttaagagatcaggataaggtacagattcttcttttccgaaatctatcagatgagcttcaattccactcttggaagcgcgccatttgttttcatttagcaataatcttctgtaacttctaaaacttaaattctgctgatgaagtttgtagatttttgcaaccaaagcctgcataatggcagcgagacaaacagtttcatcaattctcatcggcatatcgcagattctgaattcgatagtagggtagaacgggtgaactctgagatcccaccatatttttttagcattatcaatggttcctgtctttaccaaaaggtctacataactgtcaaattcagctaaagaattgaaaaaactcggaattccggttcttgggaattttacaaaaatttcctgtcggtaagacttaaagcctgtatttcttccgatccagaaaggagaatttgttgatagtgcataaacgtgcggaaggaaatacctcatcacattctgtattcttacgccttcttcacggttcggaattccgatatgcacatgaagtccgaaaattaaatttcctctcgccacatcacccatgtcgtctacaattttaatataacgctctccgtttgtaatggtgttgtgttcccagttggagaaagggtgcgttccgccgccggaaactctcagtccctgttcatgggcggtttttataagatgtcttcttaaattcgttaattcggcttttgcctcttgaatattctggcagattcctgtttccatttcaatcatggattcatgcatttcatgctttaaattttcacttaaaacagcttttccgccttcaataattttcgaaacatgagagaccagatcccggctctcaacatcaataatctgatattcttcttcgattccaatagtaaattgatgcattttttttcgtgctttttgttgatattcttattttacagaatcttttacgaaagttccccaagagatgtttggttttcccggaacatattcttttgctttttcgatcgctaattttgctgcgtgttctacgatccatgcaaaattttcttctcctacagaatttttgtctgcatcaggagccggattacagaagtcgattgcataaggaattccgtctcttatggcaaattctaccgtgttgaaatcgtagccaagcgcttcattcattttgatggtgtaatcgtgaattgtttttaataatttctccagttcttcaccctgcgtctgatgtgtagttgcatatctcagatgatgaggatttctcggctcataaggcatgatatgaacatattttttacctaaacagtatactctgtaataatcgtcaaagataatttcttcctgcaccatcattaccagttgctcggtttcgcttaatttcgaccacagatcctccggattttccacgcggtatacatttctccatccgcctccgtcatgcggtttcatatacgcaggaaaacctacatagtcaaaaatataatcccagtcgtgagggaatttcaggtttctgaaagaggtttctgaagtgtttgtcggtctttcgtgagacggaagcaaaactgttttcggaagcggaattcccagtttcgtcatcaaagcgttattaaaaaacttttcgtctgcgctccaccagaatggattgttgatgacatacgttccgttcaatgctgcatttttcaggtacgctctgtaaaaaggcacatcctgcgaaattctgtcgataattacagcatatccgtaatctgcgccctgttcaagtttatcaatatgtacaggttctgcgatgatttctccacctcccaattcgttaactttatcaataaatgcccaaggaaacgtatcttccataccgaatagaattcctactttttttgccataaatgtattttttaatgttgtattttaatgttaaatttaaattatttttaagagaaaaaggttccgataaaagttgggaaaaccattctccaaagaggccagtcgtggttgatccactttctttcatcataccagaaatcaatacctttggaagctaaaatttctgccatttccacgtttttatctttgcagatatcctcatccgaagtgcttaaaacaatatgcatatgtttgtatttccatgcttcatcatttcttacaaattcacgtggacagttgaaataaaccagttcatcggaatagccgtccataaaatttcgaatgctgaatgctcctgacaggcagaacagatgcgatacaacatccggaaaacggaaggcaaaattagccgcatgataacctccgaaactcgctcccgctaccgcaacgcgatgcgtcttatgaattttctgaatgtaaggaataaattcctgaatcagaaactgaacatatttttcataatttttaatcctttgctgaggagaaatattcttgtcataaaaactccatccgtctatggtctgaacattgtaaagtttaacttttccctgctctataaaccaattgatgcttccgttaagatgaaaatcatggttttgggtatattgtccctgtgaagtcggaaacataataatcggataaccgtaatgtcctgtaacctccactttaaggcttgttcctaatatatgtgaataataatctgtatgctctatctgtggcattttttttcgtatttgggtttaatcagtaaattgataataagatcttcctttccattctcctgatttaatgatttctaaattagggattaaaaaaggattttagggtaaacttaattttataaaatcaataatttcttgatgttaatttctctttttaaattatgacataggtttgtctttcggcggaagaatattcagtaattcagcatgaattttttctgctgccgtgtctaatctttcctgaacgattaccgaatctttcgatttgtaaacgattccgacatgataatcgataggcaggaattttaccgcctcttcacattcaaactgattgtaatccggctctttgtctttaattaaagcgacaataagccctgaataatatcctgtaggtttagaaacctcatagttttttcctcttaataaagcatcttcaattttcgcccattctctccagatgttaatgttgcttgatgcttccacgagatccggaatatgcgctccacccactcttgaagaagtttcaagaaaataatatttcccgtcgtctttgctgcggataaattctgtgtgggtcgcaccgttaataagtccgaaatttgataaaactttcgaatttacctcttcaagagccttaaattcatcagaatatcttccgagcgtttttgttctgaaaacgcctccttcatgcgaaacctgcatcggcggagccaaatattttgaggcagaagtgaaaacaatttctttattaaaagtaaggctgtctacatgataaacatctcccggtttaaagctttccagaaggaacaggtgacgctcttccccaagattattcaaagcttcccaaagctcttctttggaagacagctttttgattcccgaagcagaagcttcggaacgtggctttaaaacccacggtgcaggaacctgatctacaaaatgattaacctcatcattattaaaaactgccgtaaattcaggaacattaattccggaatcctttgctttttgtcgcatggcaagtttatccctgaaatagcggtgcgtggtttgtcccatccccggaattctgaatgtttcgcggataagcgccgctttttccacatcataatcgtccagagcaataacggcgtgtacttttctggtctgcatgagatgggaaaatccctgcacgagatgatccagattccagacagaaggctttacctcaggcatataaaatacctcatcaatggcgtgccacggccagtttttttctttaagattttcggatgttactaaaattattttattaccgagttttttcatttcatccatgaaatcataacccttgtaatagcacgaaatacatactattgttttctcctccatacaatgttttttagtttttgatgaactttcaaaaataaaaacgtttttttattaattatttaatgttaaaaattaaaatattgtgcgcttttgaaaattctatttcaattatacagagaatttttgtaataaactaatttttagtgataattttcgattaaatcggctaataattgcactccaaatccggttgcagccttttctttggcatatcctacatttccgaacgccactccggcaatatcaagatgcgcccatttaggatggttttcaatgaattgttctaaaaatttagccgcaataatgcaatctccgataggtttcatcgaaatattcttaatatctgctacatccgactggatatcgtctttccagacatcccaaagcggtaaattccaaagtctctgattggttttatcgccggtttttatcaaaagatttttcaattcttcattgttggaaaacagagcgccacacgtatcgccaaacatccttacggaacttccggtaagcgtggcaagatcaatcagaaaatctgttttaaagttttttgctatataagaaagtccgtcggcaagaatcattctgccttccgcatcggtattgagaacctcaattgtttttccgttataagccgaaataacatcactcggaagaaatgcattttcagaaatagcattgtcggtaataggtaaaatagcaacaatattgaccggaagctgcatttctgcggcataaatcagcgttcccaaaacggcagttgcaccgcccatatccgatttcatataatgcatattgtcgggatttttcagagaaattcctcctgtgtcaaacaatacacattttccgaccaagccaaaagtgactgcatttttaacattggttttgtattcaataatggtaaacgctgcatcataagcacttccctgattaacggaaagataagctcccaaaccaagttcctcacactttttcctgttaaaagaagtatattttaaatcatattttttagctaaattttttaaatataaactgaaagtatcaggtttcttgagattggcgggtttgttcagccattcctgacaggcggtttgtccgttgctcagtgcttcagcttttttgccgatggaatctaattttttctggcttaaattttcaaaatgaagctcaaatttagcgttccagaacgcatgcgttttttcgaaaggatagttgtaagttcctattaataaaccctttgcaaattcttcaaactgcctctcgttcaaacagtcggctataactaatgtcgggacaggctgtacttttcctttctgtgtctgggaaaacttcacggcaacctgctgaatttcaaaattctgcaaagtagattttccgatacctataaaatacgttattccttcttcatgggcattcacgaaaacttcatgctttttacccgtaaagaaagttgaaatgtttttattgaaatttttgctggttttcgtccattcttcttctgtgaaaagatgaaaaacctgtgtataatttttattttttttgttgattaatttcataatttaatttttaatgctttcctgatgtggttttacttccaccgggttttctgtgttgttataataaagccattcaatcgctctcgggaattcctgcgaccagtaaaattcgctgtgcgtaccttccggattgatgcttgttctgaattcgaaatcaaatagatttttcttctcccagcgttttaaatattcttcgaaaatatggattctctttaccatttttgaaccttcctgaccgcctccgtaaagatagattttcgttttaaaaggaactctgaaattcatcatcgggaaattgttgttcggttccacccaaagtgaaggggaaaatatcaaaagtttggagtagacttcaggataaagaaacccgctgtaaatgctgatcagtgcgccgagagagcttcctccgataccggtgttgtcgcggtctttttttgtacggtaagtctggtcaacataaggtttcaaagtatctgtaatgaaacggatgtattttttaccttccgatccgttcgcgacgttgtcgttatcaaaaatatactctttaattctttcttcgcttccgtgttctaccgcaataatgatgacatctccacgaccgtattctgagagaatggaaagctttttatcgatttcccagtttccgtagccgcttccttcattaaataaattctgtgcatcctgaagatacaggacaggatatttcttgtcggaaacataataatcatagggtagaagtgcccagatttttctgtagcggtctaactgcggaatgtagaattcttccgaaataatttctgcaatcggaaaatattcatccttgaaaggtccccagttgaatctccatttctcaaccgtatctgatgtttttcctgagtattttaaagcttttttgttcggggtgatacttccgtatttgtcaagttctacattttcccagcctccttttgtaaatttatactctacaatatccggcaaaagggcatcatcaatttcgataaaatagttttgggggtctttttgtgtaagttgaaagttgtagtctttcgggttccaattgttaaaatttcctgtgatgtaaaccgttcgttcatcactttctgctgtgtaaagttcaaacttcatccgtgtttttcgtaaaattaaagcataaatttataaaaaatctttttatgacaaatcattttaaaacgataaacactgaataaaaaagcggtatatttgatagaaacaagtactgcaaagagtttaacataataatttattcaaaatttattaatgattattgcagatattttttgtagtttcaagaaaaatataaaaattaaatcaaaaccgtgatgaattcggttaaaacatatactctttttacggatcaggatgtttacctttttaaagaaggtaagcattacaagctgtacgataaattcggcgcacattccgctgaaaaagatggggtgaaaggagtgtatttctcagtctgggctcccaatgccaaaaaagtttcggtaatcggaaatttcaacaactggaatcataaagatcatattctgtttccgagatgggacgaatccggaatctgggaaggcttcattgcaggtttaacatggggaactttgtataaatatgctattgaaacgccgcgtggagaaattttagaaaaaagtgatccttatgctttgagctgggaacagaatattcaggctgcctcattggtttccaccacatggtacgaatggaaagataaagactggctggaaaaccgctggaaaaaaaatacgttaaatgctccgttgtcggtttatgaactccatttgggatcctgggtaagagaaggaaatgatccgaaaaagtttctgaattaccgcgatatcgggaaaaaactcgttccttacattaaagaaatgggctttacccacgtagaatttatgccggtgatggaatatccttacgatccaagttgggggtatcagattacaggtttttacgcagcgacttcacgtttcggttctccgcaggatttgatgtctctaattgatgagcttcaccagaacggaatcggtgtgattttagactgggttccttcacattttccgggggatgcaaacggtttgcacagatttgacggttcttacctgtacgaacatgaagatcccaaaaaaggctttcatcccgactggaaatcatatattttcaactacggaagaagtgaagtgaaatcttttctgatttcgaatgccatgttttggctggaacgctatcatgcagacggattacgtgtagatgcagtaacctcgatgcttcacctcgactattcccgaaatgaaggagaatgggaaccgaacatttacggaggaaatgtaaatctcgaagcgaaagcgttcctgcaggattttaataccgctgtctataaagagttcggagataatatcattaccattgcagaagaaagttcagattttccaatgcttacaaagcctgttcatgacggaggagtgggtttcggaatgaaatggatgatgggatggatgcacgatacgctggattattttaaagaagaacacaaaaacagaaagtttcatcaccataaattaactttcgcttccatgtatatgtataatgaaaattatatgatgcctttgtcgcatgacgaagtggtacacggaaaagcgagtctcatctataaaatgaaaggcgatgaatggcagaaatttgccaatcttcgcgctttgtatgtatatatgtttacgcatcccggagcaaaactgctttttatgggcgacgaattcgggcagaccagcgaatggaattttaagcagagtctggattggcatttgctggaatatcctgttcataaaggtttgcagaaattagtgaaagatcttaatcatctttacagatatgaaacggctttctatgaaaatcagttcagcagggaaggctttgaatgggtggaagcagatgatctggaaaattccgtgtatgtctatttgaggaaaggaaagaaaaaagatgatgtttttatggtgattctcaacctgaagcctgaagttctggattataaaattggggtgaatgcagcgagtcattgggagattattttcaattctgatgacgaacggtattcgggaagtggttataaacctgaaattttcagagaacattatgaggaatacatgaatcaccagaaatccatcagcgtaagtctgccgccgctttcaggaattattttgaaaagaaaagataaaaagtacaataagcataacagaatcaaacaacataaaaagtaatgattcagttattggaaattttaggaaaagactatgaaagtctcaaggatgtcattataagaacggatttcgacagtgaaactctggagtcgttttcgaaagccggaattaatgctcctgtaagcgaagggaaatttaatgaggatttatattttttttcttttaaaattgaaaaatataaaatagagtttctaagaaataagatttgtgagatcgatttcatcggagataaaaataaaactctggaaatcatacattatcttagaacagtaaaggattttgagtttaagtttatcagcagacagcaggttgaagaaacggaatgggaaataatggatgacaatacagaagaggagagtttcacggaattcaagagaaagcgttttgaatttgatccttcttcccaatttgatgcgaatagtatagataaatacagctttatggcttttcggtcagatgatgtaaacattatagttaaagaggagtttacagaaaacagacccttttttgtatttgagatttataaatccccgaatatcgaagattttaattaagatataaataataaacgagagagaaaaaatgatcatttatcatctaagtacggagtgttatccggtggcaaaagtaggcggtttggcagatgtggtgggagctttaccaaaatatcagaataaaattaaagatattgatgcgaaggtggttatgccttggtacaacaaatctttcgtgcatgatcatgagtttgacatagtttttgatggcttcattcaccagggatcaaatatgcttcaggtacaggttttaaaggaaaaaaccaatgctttgggctttgagctttttatggtaagaattccggggcttttggatcgagataatccttacggatattcggatgaaagttttcagtttttagcttttcagcacggagcgcttcattggctgagtgcgatgggtattcgaccggatgttttacactgccatgattatcacacaggactggttcctttcatgattgagcattgtcctgaattttcctttttaaaaggtgtaaaaacaatcggaacaatccacaacggtgaatatcagggaatgatgagctgggaaatggcaaattatatgccggctttcgatcagtataaatggggacttttggactggaacggattcatgaatcctctggcaagtatgattaaatgtgccaatgcttttacaacggtttcgcaggggtatcttgaagaactttttgtaagtttcagaggtctggaaagccttgttcgtgatgaattcgggaaagcctacggaatcattaacggaattgacacggaagtctggaatccggaaaccgatccgatgctggattttaattttaacattaaaaatgccattgcccagaagaaaaagaataaagaaagactttgtaaagaatacggcttgaagccggaacttccgttgtttgccttcatcggaagatttgccacagagaaaggagcagattttcttcccgatgtggtctggaaaagcattaagcaaagttatggtgctttaaatatcatgattctgggatccggaaattcttatattgaaaataaactgaaagagtacgattacgtttacagcaatttcgctctggatcttggatataaggaacatctttcccataaaatatacgcttcggcggactttttgctcatgccgtcgagagtggaaccatgcggtcttaaccagatgtactccatgagatacggaaccgttccgattgtgcggtatacaggagggttaagagacacggtggaagatgtttccacaggtggagcgggaattaattttacgtttccgggagtagacgatattattcatgcaatgaacagagccttactagtttacaataaaaaaggtgaaatggaaaatttaatccgtgctaatatgaattttgactttgcatgggaaaaatcagccgaaaaatacatagctttatataagaattaaatcgtgaaaaagctgacttttgtatttatatttttattgattttctcctgtaagaaagaagaaggagtttgtgttggaggttattattggatttatgattacggattaaaagatatgaggagagaagaatcaacagaagggatttctgaaaagtggaagataaaatatgcagatgttggtggttgtacggtttcttccgatattgtgaaaaaggcggatgctttaaataagaaaacttatgccgaaataacgagaagatatggtaaaaattggcaaaaagaatatgaaaaggatatcgaagacttcatgatgaaaaaagttgatgtaatggatgttttaattaccaataaattattcagagccgagctcaaaaaatatcctgtagagattcatgatctggataaggatgtgaaagaattaaagaatgacttatataaagttgtaatttataatcaaaaattaaaatctgaaaataaagaatgtttcacggtaaatgttgatacaaaaaacagaacagtaaacctaataaaataaaacgcaagataaactatgaatcgcaatgtaatttccattgttttaggaggaggtagaggaaccagattgttcccacttacgtattcaagatccaaaccggctgtacccatcgcgggaaaatacagattggtggatattcctatttccaactgtttaaattcaggattaaataaaattctggttctaacgcagttcaattcagcttcattaaattcccatatcaaaaattcttatcattttgatattttcagcaaaggtttcgtagatattttggctgcggaacagaacgttgaaaacgacagttggtatcagggaaccgcagatgcagtgcgccagtcgatgaagcaccttgaaaagtacgattatgattatatcctgattctttccggagaccagttgtatcagatggatttcagggaaatgctgaattttcatattgaaaaaggcggcgatgtaaccattgccaccattccggtgaatgcaaaagacgcaacaggtttcggaattttaagttccgatgacgaaggcaatatcacttcgtttgtggaaaaaccgggatatgatcttttagaaggattaaaatctgaagtttcggaagaaaataaacacgccggaaaagaatatctggcttccatgggaatttatatcttcacgaaaagcattttgaaaaagatgtttgatgaaggagcaggagatgatttcggaaaggatatcattccgaattccatcggaaaatacacaacattaagctatcagtatgaagggtactggacggatatcggaaccattgaatccttctacgaagccaatctcgacctttgtcaggattttcctaaattcaatttattttcctcttcgcctgtctttacacgcgcaagaatgcttccgccatcaaaagtaaacggttcttatgtaagcaaagctgttttcggagacggatgtatcattatggcagataaaattgaaaactccgttattggaaacagaacaagaatagataaaggaagtaccattgtaaattcttatgtgatgggagccgatttttatcaggataccacagaaattgtgaagaatgacagaaacggacagccgaacatgggaatcgggaagtattgctacattgagaaagccattttggataaaaactgctacatcggcgataatgtgagaattattggtggaaaacatattcaggacggagattacggaacccattctgtgcaggatggaattatcgtggtgaaaaaaggagccgttataaaaccgggaactcatattggatagaaaagtagggaagtttgaaatttgaatttttttggaaggtttgatttaattaaaatttttaaaaattaaacagtcagatagtaaaacttccatcctctttacttcgtatcttccagctaaaaaaataattaaaaacagagtgatcagcattggtcactcttgttattttctatacttttgtacaatgcgtttttttaagatcatagcggtagtaattgtcttgttaattggagcttatgcagcttcgatgtattattttgtggatgaaagcaaagatttcaaaatagaaaaggagatcgattatcctttggaaaaagtctttttacagttcaataacctgcagcattttacgcgatggaataatttcttcacaagttcccagtctattgatatcgattattatacgccttatgaagggctgggaagttctattagctatgtagatcctaaaaacgatacggatggcgaaatgtttatccgttacgaaaacccgaataaatctctaagatatcagctttttgaagaaaaaaacgaaagcccgactgttgtcgatgttaaatttaaagcattatccgctgaaaaaaccaaaattacatgggtcgttcatacgcctaaactttctgttttaagaagagttgaaaatttctggaccgaagaccgttttgccgaaaacatcaacaaaagtatggcaaatcttaaaaatgttttgggcaataaagtggaaaaagacaatcagatggcttcaataaaatacgacagtctgatggttgaaaatgaagaagaaaaattattgctgggaataaacgtaagtacttccaacaaaaaagatgcgctttacaagaatattgtgatgaattataacaagatttacaattacaccacaatggatctgggcaaaaaagaagatgaattcggtttcccgatgctcattacagatgcggacaattataaagacaaagaagtctcttattttctgggaattcctctgtctaaaaagtttggcgttacagataataacttcagtttcagaacggttagtccgacccagaattatgtgatgtactacaaaggaaactatgccggaagagtaaaggctatacaacaattaatccagaaagccaagaaagacgagatgcgttttaatgatattcgtcagacttttatagaacgacctttagaagatcaggatgtaaatatgaagctctcattatcagtatttaagtaaattctgcagatttatttcttttatagtttttttaatactttaaaggctgttcagaatcggttttttttattaaatttgaagcttaattctacaaacaaattttaataacagataaactgtaataatggacagattttcattcctaaacgcagctcattctcagttaattgaggatttataccaacagtacttaaaatatcccgattctttagaaccatcatggaaagccttctttcagggtttcgattttgctttggagaactacggagacgatgataacgttcaatatgttcaggctcctgcagtttcagcacctgttgttcagcaggcaactcaggcagcaacaaacggagaagttccggaacacatcaaaaaagaattcaaggtagtaaaccttattgaggcgtacaggacgagaggacatttgtttaccaaaacaaaccctgtaagagaaagaagacattatacgccgactttagacatcgaaaacttcggtctggataagtcagatttaaatacaaaattcaactgtgcggttgaaacaggaatgaaaggtcctgcaacactacaggatctcatcacccacttagaaaacatctactgtgattctatcggtgtggaatatatgcacatcaacaatgttgaagaaaaagatttcatcaagcagtggcttcaggtaaatgaaaaccatccgaatctttcagccaacgaaaaaacggagattttattaaagttaaatcaggcggtagcgtttgaaaattatcttcacacaaaatttgtcgggcagaaaagattctcattggaaggtggtgaaactttaattcctgctttggatcagttgatctcaagatcttctcagttgggcgtagatgaagtggttttaggaatggcgcacagaggaagattaaatgttttaaccaatattttcggtaaatcttacaagcagatcttctcagaatttgaaggaaaagaatttgaagaagatgtattctcaggtgacgtaaaataccacttaggttcatctaaaaaaatcaaaacagcttcaggagaagaagtttctattaatctaacaccgaatccgtctcaccttgaaacggttgcagcccttgtagaaggaatctgccgtgcaaaagtggacgataaatacaaagattattctaaagttttaccgatcattattcatggtgacggagcaattgcagggcaaggtattgcttatgaagttgcgcagatgatgactttagaaggttataaaacaggaggtacggttcatatcgtggtaaacaaccaggtttcgtttacaacaaactatatggatgcgagatcttctacttattgtacagacgttgctaaagttacagaatctcctgtaatgcacgtaaatgcagatgatgcagaagcagttgttcatgcgatccattttgcagctgatttcagagcgaaatttggaaaagacgtttatatcgatttattaggatacagaaaatatggtcataacgaaggagatgaaccaagatttacacagcctaatttatacaaaacaatttccaagcacccgaatccgagagaaatttataaagataaattactgaaagacaacgtaacatccaatgatgtgatcgctaaaatggaaacagaattcaaagcacttttagataaagactttgatgcttccaaagaaattgaaaagaacgtaatggacgttttcatggcagatgactggacgaattatccgattgggaaaagaggagcagttcaggagcctgttgatacaaaatatgatcttgaaaagctgaaagaactggctgttaaaatgtctacacttccggcagacaaaaagttcttaaataaaattacaagacttttcgaaaacagattaaaagcaattgaaggaaactctttagactgggctcttggagaatggctggcttatgcaacgcttcttgttgaaggtcacaatgtaagaatctccggagaagatgtggaaagaggaacattctctcacagacatgcagttgtaaaaacagaagataccgaagaagaatatatccctttaagacaggtttctgaaagcagatttgatgtattcaactctcacctttccgagtacggagttcttggttttgattacggttacgcaatggcttctcctaatacattaacgatttgggaagctcagttcggagatttcgtgaacggtgcgcaaattatcgtagaccagtacttagctgccgcagaagaaaaatggaaaattcaggacggtttggtgatgttattgcctcacggttcagaaggacagggagcagaacactcttcagcaagactggaaagattcttaaccctttgtgcgaacgaaaatatggtggttgcaaacatcacttctcctgctaactatttccacctgttaagaagacagttgaaatggtcattcagaaaaccattggtggtaatgagtccgaaatcattgttaagacatccgaaagtggtttctccgcttgaagatttcgctaacggaggtttccagccggttttagacgatccttctgcagatcctaaaaaagtagaaaaattagtgctttgttcaggtaaattatacttcgaattattagctaaaaaagaagaattaaacgctgaaaatattgcactggtaagattcgagcagttatatccgcttcagacagatgctatcgaagcaatcttcgaaaaatattcaaacagaaaagaattggtttgggctcaggaagaacctgaaaatatgggagcatggtcttatatcctaagaaacttcagagaaacaggaatcaatgttattgctccggttccaagtggtgctccggctccgggaagtcacaaaatgtttgagaaaaatcagaatgcagtaatcaacagagtattcgacagaaacgatgctccggtaaaaagacctgtaaccgcttaattaaaaataataatcaataaaaaaataaaaaatacgatatgtcagttttagaaatgaaagttccttcaccgggcgaatcaattacagaagttgaaattgcaacctggcttgtaaaagatggagattatgtagagaaagatcaacccatcgctgaagtagattcagataaagctactcttgaattgcctgctgaacaaagtggtgtaatcactctgaaagctgaagaaggtgacgttgtacaagtaggacaggtggtttgtttaatcgatatggatgctgcaaaaccttcaggaagcgctgctcctgctgctgaagctccaaaacaggaagaagctccgaaagctgctgaacctgctaaacaggaagctccggctccacaacctgctgctcagcctgtagctgctgcaacgcagacgtatgcaacgggtgctccttctcctgctgctaagaaaattcttgacgaaaaaggaatggatgcttcacaggtttcaggaagcggaagagacggaagaattactaaatcagacgctgaactggctgcagttcctgcattgggaggaaaccctgttaccgctacaggttccagatctacaactacgactaaactttcagttcttagaagaaaaatcgctcagagattagtttctgtgaagaatgaaacggcaatgttaacaactttcaatgaagttgacatgtctgaaatcttcagattaagaaaattatataaagaagaatttgctcagagacacggagtaggacttggtttcatgtctttctttacaaaagcggtaacaagagctttacagatgtatcctgatgtaaatgcatccatcgacggagatttcaaagtaaactacgatttttgcgatatttcaattgcggtttcaggtccgaaaggattaatggttcctgtattgagaaatgctgaaaatatgtcttttgcaagcgttgaagccaacatcaaagatttagcgaccaaagtaagagacggaaaaatcacggttgatgaaatgactggcggaacgttcaccattacaaacggtggaactttcggatccatgatgtctacacctatcattaaccctcctcaatctgcaatcttagggatgcacaacattatccagagaccggttgcggttgacggacaggtggtaattcgtccgatgatgtacgttgcgatgtcttatgaccacagaattatcgacggaaaagagtctgtaggattcttagttgcagtaaaagaagcaatcgacaatccggttggtatcttaatgaacggagacgaaagaaaaggtcttggattataattattgataaaaattatagtataaatacaaatctcgcctcaaaaaggcgagatttttgtatctcttgtaataaatactaagatgatgttttctaaaatgacctccaatatcaaagtttcagtaatacctgaatatgatagcaaaaacagttatccgtccgaaaacagacacgtttttaaatacaatatcgttattgaaaacgaaggaagttttccgataaaaattcttaaaagaaaatggctgatcttcgacgtaggcttcggatatacagagatcatcggggatggcgtaatcggcttgactcctgagattcctacaggcgaaaatttcgcttatttctccaatgtgatgcttcgttccggagtgggaaatatgagcggaaaataccttgtaaaaaatatggaaacgcaggaaagctttgaaattgatattcctaaattcaatcttttatcagaagttttaagcaattaaaattccaaaatctggaaattaaattctgtattttggaatttgtctgttttaattcgaaaaaatagcaaaaagattaaagtttttttatttttaatttcatcagatcattcacctcttcattgcttgtgagaaacagtttttcaaaagccagtaaagatattttagcacaaacctctgcatcgtcacccgcactgtgatggttaaaactgatctggtggtattcagcaagatgttttaatccatatctcggaagataattccatgattttttagctaactgaatactgcagagataattgagtttcggcgtgaacattccataatgattcaggcatccgcgaagcacacctgcgtcaaatcctgcgttatgggcaatcattaacgttccatacatcatttcctctacttcataccagatttcgtcgaaagtaggagcgtcttttacatcatccggaagaataccgtgaacatccacattaaaaggactgaaataaggaaaactcggtggtttgatgagccatgttttggtctcaatgatttttgaatcctgcacaacacagattccaagctcacacgcggaatttcgctcgtgagttgccgtttcaaaatctattgcgcagaaatccataaataaagtttatagtttattgttttgagttaagggtttaaattttctttttatcccctaaaaaatgtttgaaaacaagccatttggcttggtaataatctgttttctgatgtttctgacggcgttttaaagtgccgggaatctgtgcgtaaaatccgaaatgacctcttaaaactgcccaaaaatgggaaattccatttttataggcaaaataaaatgaggcagctccgtcaaggcacaatctgaaaaaaatcagccagattaattttggaaaaggcaggttctttagtaacatcgaaaaattattccggatgtttagaaacgttttctgtgcactttgcttgtttaaagttcctccgccaacatgatatacttttgattttccggtgtaaaaaactttctttcccgaattaatcagtctccagcaaagatcaatttcttcctgatgtgcaaaaaaccgttcatcaaaacctttctgctcccaaaaatctttgcttcggataaataaacagcatccggaagcccagaaaatttccgtttcatcatcatactgccctttatcttcttccagatcatcaaaaactcttcctctgcaatacggatagccgagattatcaatcaaaccgcctcctgcaccggcaaattcaaaatagtttttattgttgtaggaaagaattttgggctgaaccgctgcaatggaagaatctttttcaaaaatttccaaaacaggatcgatccagttttcggtaacctccacatcggaattcagaaggcagtacaattcatttttaatttcttttaaaccttcattataacctcctgcaaaaccgtaatttttattgtttttaataatctgtactgaaggaaaattcttttgaagaaaatcgagagaatcatcggaggaaagattatcaattacataaatatcagcattttgagaaaactgaacaacattgggaagaaatttttccagccagttttttccgttccagtttaaaataacgactgctaattttttcgacatgagaaattaaattttttctgaatcaaaagtttttatagaatcctgatatttccattttctgtgcgaccataagtaattatcgggtcttttattcaacgtgttttccaataatttatggaattttttcaccacttcattttccacaaatttttctccgtccggataaattctgtgataattaacctggtaataaccgcgttttaccttcttcatttcacagtaaatgaacgccagatccattcttgttgccaatttatcataaccaatgaaaaccggagttctctggtttaaaaattctaaaccgtaattaacgtgggaaaaatgaggagtctggtctgctacaaacatataagcagagctgcctttgcttttggatctgaaaatatgcataatcacttcattggcttccagtgcttcattcccgaatttattacggacttttttcatctggttttcccagaaatcactgtttacttttctgtaaacaggatgacagtgatcctgcggaattacttttgccagtgcattgatccattcccagttaaaaacatgtccggcaagcataatcacatttttgccttccgcttttgcctcatgaaaaacttcctgattgatgtgctgcattcttacccgcgattctgtttcggaaatactgaaagattttaccgtttctacaagataatcggaaaagttgagatagaatttcttccggatctctgcaatttcttcatccgttttttttggaaaagaattcttcaggttttgggtaattacattttttctgtagccgacgatataatgattcagaaagaaaataatgtctgaaaatacatacaaaactttcagcggaagtttggaaatcagatataatattttgataaggaaattcataaaacatgcaaatttacgcataataaaattatggttctgtttttgcttacaaatagtattatttttttatttttaacgtatgaaaaaattatcattaatcgcatttctgggtttaagttccattgctttctcccagaataccaataccgtaagacaggaagttaaaagtggttcagaagaaaaatcgttattggtaaagacagatcatgctgaactgaatgccaagaaaaaagcagcagaagagaaggcgaagcttccaaaaccttatgatccgaaagcagatgcagaaaaagatattcagaatcttattgcaaaagcgaaaaaggagaagaaaaacatcatgattcaggcaggaggaaactggtgtatctggtgtttaagattcaatcagtatgtacagactactccggaacttaaaaaactagtggacgacaattatgtatattaccacctgaattattctccggaaaacaaaaacgaaaaaatatttgcgaaatacggcgatccgggaacgaaattcggatatccggttttcatcgttctggatcagaatggtaaaatgatccacgttcagcagagcgacgttttagaggaaggaaaaggatatagccttgagaaagtgaaagagtttttcaacgtctggtctccaaaatcataatcataaccgggaatttctcccggtttttttgagtctgtttaaactttttatttaaccgcaaaaggtacaaaagatgaactaaacttttatttaaagctgatcattataaatgaaaaagttcacaatagtttttaaaaatctttgatttttattattttgagcgctttgaatattattgaaatttgctttaacattgccttttgtgtcttttgtggttaattctgaaattagtttaaacaggtttcttatttaaataatattccttaccacaattttcaccggatgatacagtaaaataattactgcggtaattaaagccaaccagaacaatcctgtaaaaatctccatattggaaagcagaattgcctgtgaatttatttttgacttaaagattccggcagtgacagacaaagagtcattaaccggaagtttcgaaatggtatttccaaaaatttggttccattgcgacgcgaaaatcgggtttgtgcttacaaattccgaacttaaagaatcggaatgttttagggttaaaaaaagcatcagattctgcatcaacgcataaccgattgctgtggtccagaatcttgtggcggttcctactgcggtcgcattggaaacgtactgttccggcattcctgcgattaagaagaatacaagcggagtaaaaagcaagccttgtccgactccctgaagaaacaagggcggacaaatcgtctgaagcgttgtatccggataaaaagtgtaggtaaaccatgcgctgtctatggctaaaattaaaaacccggtaaaaaatacaagccttgaagaagcacctttcgtgatgcacaatgcggacagaaaaacgcccaaaagacttcctgcaacgttccagtactgaacttccacaatataatcccactgccatttccagacaatagccatcacgctgtatacattgttgatggaagctctgagaatataaaagataaagaaaagaataaccccaacaattacatttttcgagctgaaaacttcaaaatgaaaaaacggccgcggctgatttctctgtttcagcataaataatcctccaaaaatcaggaacagtaaaaaacagaatacaatactatcggactcaaaccacatcagtctttttccatagatcagcgcgtaacctcctgcctgaagacatccccaaagcaaaaaccagcttgcaatatcaagttgatacaaaggttttttcgggaaaaatctgtttttattgaaaatagcaaaagccattaccagaacgaaaacgtgaaaatagaccatcatgagaatcatgtggcggaaatcgtagttttctatgcttgatttcagcagggaagtggttaatgttccgcctgtaagaataatggtgtacataaaaaggtaggcaatttctttggcgtgttttgtctttaattcagccacaataagcgggagaaaaatggctccttccagaactccgaaaattccttccagaaaacggatgacaagaataatatgataatcatgcgtaacagaaagtccgtaaagaatgagaacggaagcggaagacatcagcaaagtataatattttacgctgaaatatgccataaaacgctgtatcaccaaaagcgtgaccacaaatgttccgtacatcaggatcatgagatactggatgtcgtccgaatctgcatccataaaagacgcggtaaatgcactgttggaatgcagaagcgacagcagcatcagatgcggaaaaagcgcgagaataagaagcggaagtttcagccactgcggaacccatcgatgataaactgaattgtgatgcataattaattgaataaaggaaataaaaattgcgaaaagacagagaattgtaaaaaaaggtaagatgacaaaattgtattctgccttttcgctaaaaataattgattggttaattaaaaatccgagaaaaaaaaaattgaaaaatgaagactctaaaaaactcaaaccctctcactctcaaactctaaatcttcttcgcactcaccagaacattcattccggaaagcaatttttcattgttttgatttttattgagaatgatttttaccggaaatcgctgctctatttttacaaaatttcctgttgcattatccggctttaccaaggaaaactgggagcctgaagcaggagaaaccgacacgatttttcctttaaattccacatcaggatacgcatctgcggtgataatgacttctttttgctggtcgatttgtcccaactgcgtttctttataattggcaatgatccatttttctttgcttacgatctgaaccaaagcctgaccttctttgatcaactgtccttcctgaatggttttctttcctacccaaccgtcgtagggcgcggtaacaaaagtataggaaagaaaaagcttcgcattgttaagattggcagaactttgctgtatctggctttttaccggagcgattttcgttttttgctcactaacgcctgcttttactgcattcttttgctgttctaaagctattagactcgcttttgcctgttcgtacaaagcttttgcattttcaaactgctgatcggttgctgcatcttcatccactaaatttttataccgcttaaaatcctgttcggttttccagatgtcgattttggcggaagcaatttttgcatcaataattttagtgtcactttctttcgtattcactccgctttcgatggtattgatattatctgaattggcatggagaccggcttccgctatttttacctgattgataaattcgcggttgtcgatgataagtaaagtgtcgcctttatgcacaaactggttttcattgaactttattgtctttataaaacccgaaactttgctggaaaccggcgtaatgtactgttcaatttgtgcatcgttggtcgttacattttttctcgaaaaaagatagaagcttaacattccagttattccgctgatgataagaatccacgccaaaacgctgatgattttattgattcttttttccttttgtgttaattgtttcttcgccatagttttataaatttccaatcgtgtactggagttggtaatattttagttgtcggttaatttttacggaaataaggttggattgcgcttccagataggcattgtcggcatcaatgagttcggtaattaaacttagcttattcgcatatttggtctttacgatcctgtaattttcttttgcctgattaatggcttcttctgcgatttttaccttttcttccgtttcttcgaattttttgaaagcttcatacacttcatgccggatattttcttcgttttcttcgatctgcaattgggcaagagttatattttcttttgcttcctgcattttgtatttgtttttatacagattttcgatggggtaggtaagattgataccgatcattcccaaacggtacgcataaggttcgggcggaaaaaacatcatgttgggatattttaaaaagtattctccgcctgcggtaattttcggtaaataattcgctttggcaattttttgatccagttctttcaaagtgagatttttattggcaatttctaccaattcgtttttatgtaaagcggtttccgttaattcattgatataagggatttctgcattctcagaaattaaatcttccgtttctgcgtggatttcctgattttcaggaagcgaaagcaccgttttcagcttatgttctgcaatctgaatatcattatccagttctgtccggctcattttatggttagagagctgtaaagaggttctcagaacttcgtttaccgtaaccacaccgtttgctttcagagcttttacctgtttgatgtttacggaatcttctttcattttatcattaattaaacgctgctgttcttttaaatgatgaatctggagaaaagcggtgataatttccatctttagctgtctctcattcagatgggttttaagagatgaaatttcggtatcaatggcggcttttttttcggtatttttaatttttccacccatgtaaaccggaatggaagccgaaagcgtaaaatcgtacattccattgatgatgttgtactttgttgcttttgcaaacacgccgtcttgatgctgaaaaagattggtgacctgattgtagcttgtgtgaaattctacatcgggaagcttttccattttcagatctttttctctggtttcggacatttcatcttttaaatggctgatttttatttttttgttttgaattaatccgatctctattgctttttgtagactaaggtgttgataatcggttatctgtgcctgtaataaattactcataagtaataagcacaacgcaaaccactgatatctgtttacgtatgatatcattttcataaatatagttaagattttttgctgaattgattttgactctgcaaatttacgcggtgcagcttcggacatgatttgtgaaaacagaaaaagatttgctcatttacgccatattgaaattttctctttacctttattgaatgaacgaaagtcactttaaagcagtagaagaagcagattcggaattttacgtttatcatgtacttaccggaaaggtgaaaaccgaaatccattatcacagttcggctcagttggtgtatgcagaaggcggaatcgtgcatattttcaccgatctgaaacactggtatttaccggcaagatgttttatgtggattcctgccggaacaccgcattatattttttctacgagtccaaaagtggatctgtacaatttttattttaaaaaagaagaaaacgaaaatggcttttttgatgaaattaatatttattcggtaagtcatcttcttcgggagatgattttgtacactaaagactgggatgggaaaatcataaagaatgacggagtaaaatatgattttcttaaagcattaaaaggaattttacctgaaaagagggataagaaatttgcatttccggttcagcatccttttccgaatgacgaaatgcttctgaaggtggcacaatacattcatgcgaatctggagaagcctttaagcatagaagctacggcaaaagaattcgggatgagcacaagaacgctttccagaaagtttaaggaaattctgggcatgaattacgtccgttttttacgtgcgctgagaattacccgttctctggaactgatgctggaagggaagtacaatatgtatgagatctcgatgatggtgggatacaatagtttgtcttctttcagtaatatttttaaaaaagtgatcggggttgctccgacggattatcttcagaagctgaagggtgaggagtgattttgggttggagggtttagagtttgagagtggtagagttggagagttttagagttttagaacgggagggtttttgtgttttttctaaatactaatgatacaagtttttttatggaaacattaattaacctcagtttggaataagaaataaatttaaataattgatttatcgcattatattaatttatcgcaaagaaaaacaaaagaattaatttatttatttatttatttattgaaattttttaagctaaacaagggcacttcgtttatataaaaaagacaaaaatggtattactttgataagttttacgcctttgtatatcttaaaagcagaattcctgataattgaatctctttgtttacccttgcgattaagaagatttatcccgaacttaggataattaaatttctgcttcattctttattttcggagaagtaagtgttgtgaaaacgtatcagtattgattgatgacgggaattttagccccgattgtaatgaaaatccttttttgcaaaaaaagattgtaatgaaaagcgggaaatagctcctgaaaaatataggaattttctgttggagggtagatttctcctccgtcgaaatgacagatgtgttgatgtaataataaattgttgtaagagattgtttcgttgcttcagaacaatgttcgcagaccttcagtgtcgcaaaaacataaaaaaaccacttcggttgaagtggtttatatgttgagaaaatctcgtcttgattaagcttcttcagaagatgcttcttcttttttagcaggagctgcttttggagcttcaaccggagcatcagatacaacatcgaattcgtagttgtactcaacgtttctgtgaagtctaacaagagctgagaatttaccagttctcttgatggtatttccaggaattttgatgtattttttatctacagatacccctgcttttcctaaagcttcagcaagatccgcattgttgatagaaccgaataatttatcaccagtacctacttttgcagggattgtgatagaagttttctttaattgctcaactacagcgtttgcagcagcaaccaatttcgcttcttcttcttttctagcctccaaagtagcttctaaagctgcgatgtttttaggagtagctaataaagcatacccttgaggaattaagaagtttcttgcataaccaggctttacgcttactgtgtcgaattcaagacctaagttttctacgtctttttttagaataatgttcattgttgttgtccgttttagagtttggagttccggggtttatataccggcttactcttcacatcgttagaatttataaattaattcagcaacaaaaagccaaaagcgagaagctaatggctaattgcaatttttttattttaataagtcagctacgtatggtagtaatgccaagtgtcttgctcttttgattgcagcagaaacttttctttggtattttaaagaagttcctgtgtatcttcttggtaagattttaccttgctcgtttacgaactgtaataagaaatcagcatctttgtaatctacgtgcttaattccgtattttttgaatctacaatatttcttttcagattttgtattgatatcaagcggagtaaggaattttacttcagattctcctccagctgaggcttgtttagccatttcgtctattgccattgtcttgtcttttaaaaatagggttaataattaagctttagctgcttttacttttgctcttctagttacagcatagtcaacagcgtgtttgtctagttttgtagtaaggtaacggattactctctcgtcacgcttgaatgccaattctaaatcagcaactacagaaccttcacctttaaattcgattaaagtgtaaaatccgttctttttcaattggatcgggtaagctaatttttttaatccccagttttctttagcaacgatttcgcagttcttttctttaataagatcttcgaattttttcactgcttcctccacctgtgcatcagatagaacgggagttaaaatgaaaacagtttcgtaattgttcataatgttaaaaaatttgttaattatttcgaggtgcaaaagtagagaatatatttgtaatatgcaatacgaaagcaaatgtttctgaaaaattgttggtggtgaattgttgtcagttcacggtttttgattgttgttttttataaatgaactttaaacctcaaaccctgaactctaaatactatcgtcttttctgatctccgttaaaaaatttacttttatgacgtcatataaagaatgtcggcttaccaaaatggaggcaatggaagacaccattccggctaacataagatgaaatattaaagaatgtctgtcggtcatttccagaacaatgattgccgatgtaaaaggcgctcttgtaattcccgttaaaaaagcaaccattcctgccaaaacaacaacattggtttcattcgggcttaaatgaatgaatcctgaaattacagaaccaatacttgctccggctgttaaagcaggggcaaaaattcctcctgcgccgccggaagtgaaggaaagggcaggacccaacattcttaaaaccggaacgtaccagtcttcatgtttttctgaagtgaaaagaacgcgttccatgatttcttttccggagcctaatatttctctgttgatgaaaaaggctatagaagcgatgatcagagcgcagaaaattaaaaacgctacgttcgcacggtctgttttaagttttcttttcttccagtcattcattttcagcatagttacggagagctgactggctaaaattccggcaattccgcctactaaaatgatgggaaacatgaccattaaagaaacgtcatttgttttcggatatcctaaataaagataagaacctgccaaagtctgcgccgttaaacctgcaatgataactgcggtaaacaaagcggttttaaagtaattgatatgggttttggaaagttcttccacggcgaaaacaattccgcctaaaggtgtgttaaaagctgctgcaagtcccgctgctgcacccgtcataatcatatttttctttgaaattttcggccaccattcgggaaggtattcgtttacttttctgaaaacagaacctgcaatctgaatcgtaggaccttcgcgaccgactgcaccgcctccgataaccaaaaccaaagaagaaagaattttaaaaacaataatttttaagcttagtaaacttcggatctttttatgttctttcgggttggctaattctacggctgccatcacctgaggaattccgcttccttttgcattcggggcaaattcttttacgagccaccaagacaagacaaaaccaatcggggcaattatgaagatcatccaggaatgccagtccaaaataaaatgcagaagattttctccccatgcaaaaattttggcatacatcaccgctacaaatcccgtaatcacagagccgatccagaaagggattgcctgaagcagattgtacttcagttgttcgtttctaatattatcaaaagatttttttagagatcttcggatgatgactattattttcagcattaaatggtttgtcgcaagattgttgataaaaataaggaatttatatttcttctaaaaattttgctgcccgtaaagcgttttgtacagaaagttctttaggcaaggcgaagcttaataagtcgtttttaatttccagcttaaaatcttcattagaaaatgctttgattatttcttttcgttctgagtttaaaaaggattgggtttttaaaggatcacttcccaaaacataaaaatctttaaaatcacggtctttaaaattaacagtaaagctgctgaatattcctgcaattttatctgcccatttctttctgttgactgaaataaatccataatcactgcttaattttttcattccccagatttgcagactgtcgtatgaagttgttgcgcgtgctccttttgcggtggttcctattttgctgacgataaagagataaaaagaattttgtctatttttatccgtaatgaaatagcctatttttggagtaaaaagcggtatttcttcagcggagttaaattcatgaaaaggggaggctttgatttcaataacagcaatatcgtaaatttcaaaaagtttgtcataaacctcaaaaatcagattttcttcttcttttgaaaagtcgaaaagttttttaacgtttaggtttctgaaatcgagttccacggtgaaagtttttttagtttagacaaactgagaattaaagttaaacattgattatttttttattaaatcttgtattttgttaatcatattttctgcgttggtattttcagggtttaatgctaaagattttttataattttctaatgctaaagtatagtttttaattgaaaaataactttctcccaaactgtcaaaagcattcgccgactgaggattttctttagtatttaatgcaaaaacttttactgcctcattaaatctggaatttctcattaagatatatccgatattattcaatgtgtcttcaaaattccattttgaatgttttgctttaatagcataataatttttctcagcatttggattgtttggcttagcaaattcagtaataattgattcttctgctaacagaaaattatctgttaaattgttatccacgatggatgcaatatgatttatgatgtgatattgttctggaaaaaagttataaccatttgacatcataattattgccatattattttgtggataaaatctgaaagcgctcacatttcctccagaaaaaccgtaagacgaaatattattcactttattgatttcccagccgtatgcaaagacatcttttttatttccatattcaaatggtcgccacatcatgtcttttgttttttaattcagaaaatcgtttttacttaaatggctgctccattctaaaaatgcaggtaaagttatagctattccgtttccgggatatgctttttttccttcaacatctttagattttacatattttttagtctccgaatcgaaattgtattttataacacggttcggaattttttcaagagcatttgacgaataaacaacttggttttttacatcagaaaattgattacttagaataaaatcttcaaaagattgtccggtaactttttcaataatcatagaaagaagcatataattcgtttgattatatctgaattcatttcctgttttaaaatccattttctctttgctcaaccgttcaatagttttagaacctgaatattctggcagaatatcactgaaagcaacaaaatccggtattccggaagaatgggtcaggagattttttaccttcacattttgccattcctgtggtagattttcaacgtattttgaaacattgtcttctagagaaagttttccctgttcaatcagttgaaaaacgccaacgtcagtcattaattttgaagtagaatatatcctgaacattgaacttggacttacttttttagtatcttctaaactttccgtaccgtaatattgctcaaaaattactttatcattttttacaacaccaattgctaaaccgggaatctgacttactttaatggcttctttcgcgtaattatcaattaatttaaactgattggcttgctgcgaaaaagagacggcataaatatttaagacaaaagttgtcagaagaatttgtttcatattttgagaatataggttcttgcttttatttaaagacagttaaaaaaagcattctattacatggtttgtccagatttggtataaaatgttacaaagtttttcaaactaaaaaacctccgaaaaaattcgaaggttttatattgtaaagatgtttcgataagcttaatataacaattgtatcatttatcacttatcattcatcatttataaattatatttccgtattcagatcccagttttcaaggtaatcatgaacatgtttaagcatcattccgcctaaagatccgtctacaactctgtggtcgtatgagtgagacataaacattaagtttctgatagcgattacatctccgtccggagtttcaagaacggcaggctttttaacgatagctccgattgccaagattgcaacctgaggttgaggaataatcggagttcccattaagtttccaaaacttcctacgttagaaattgtatatgttgcaccctgagtgtcttcaggtcttaattttttgtttcttgctctgtacgctaaatcgttgattgcttttgccaatcctgaaagtgataactgatctgcgtttttaataacaggaacgataagatttccatccggtaaagccgttgccataccaatgttgatgtttttctttttgatgatgttttctccgctgatcgacacattgatcatagggaaatcctgaatcgcttttacaactgctttcacgaaaatcggcatgaaggttagtttttcaccttcacgtttttcaaaaagagatttgtttttatttctccattttacaacgttggtaacgtctgtttcgatgaaagaagttacgtgcggagcaatctgcttcgcttttaccatgttttcagcgataatttttctcattctgtccatcggaatgatctcatcacctgcagcagcggtaatcgtagcagcaggagctgaagtcgcaaccggttgtggagcagatgcagtttgtaccggagctgcctgctgaactggctggtttcctctgttcttaacgtacgctaaaatatcttctttggtaattcttccttccagaccgcttcctttgatggttttcagttcggtttcagaaatattttcctgctgagcaatagattttacaagcggcgaaagataaagatctcccgaaaactctgttgaagcagcaacttttaaaggttcttcaatggtttttaaggtttccgcgtccggagcagccgccggagtttccgtttttacttcttcagaagcagtgtttccgccttctccttcaatttctaaaatagcaatggcttcacctacttttgcaacttcgtctttctgttttaaaatctttacgattttccccgaaacgggtgtcggaacgtctgaatctactttatctgttgcaatttctactacggaatcatcctcttttacgctatcaccttcgctgaacaaccaggagataattgtcgcttccataacaccttctcccatggacggaagcaataatttgtattctgccatttttaatttttagattttgacaaatatataaaaaaaatcgatttttttatgaaatattaaattttagaaaaattcaatgtaaatattttcgcctacgttaagcccaaacagggattttgccccgttttttcggcttcctttgtagatggtaagctccaaaagctgactgtcattgaagattgcagcagactgcccgtgaaattctgtttcccgatcccagtccgaaaccacttccgtatgactcgaaaagactcttgaaagtgctaagtttctgaattttatcgtgaaactttcgtatccttttgagatggtttcaaaaaaatctttattaatatttgagattatatttccgaaattatcaatgtaggtaacttctccgatgatcatcttttcggattcattgtaaacaggtttcggaaacagaagctgttttgcagagtctatttttctgccgattacttcgggaagtcctccgtttgccagatgaacggctgcaggaacaaaaacgtccgtagaagtaaaattaacgatatcgtcgaaacggttgttcaaagtgatttcatagatcgcttcaggtttaatatcaaaaaagattaaacttaaaacgccgttatctgctgccaaaaagtaatgaccgtcggatttatataaaatatttttcctgtttctgttgtgaaaactgtctacggaaacaatatgtatggtgcctttcggaaaatgtttgtatgcatttcttacgatgtaagaggtctgtataaggttaaaagcctgtatttcgtgactaatatcaacaatattaaccttctgattcagagaaagaatgctcccttttacagcggcgactctgtaatccaaatttccgaaatctgaagtgagggttataattgacattgatggttgtatagaatgatagaaatgcaaatttatctaaaataaaaggaatgcccgaaaaattatggaaaagaatttgatataaatttcaaaaaaagctttaaatttaaaatctaaaattaataataatactgcatgtttgaattgacatatgatcttgaggatatcgatgcgaaaatcttctacggagtaaacaaccaatttttcaaccttataaaatctacttttcccactcttaaaattaccggaagagatcactatatatttgcgatgggcaatcaggaagctttggatatatttaagaaaaagcttgatgatattgtcaattttatttcaaaaaataattctatagacctgaaagatgttgaaaatcttctgaatattaaagatgaaaacgaaaagcagcttgtttttgatcaagatatcattgtaaaaggcgtaaatggtaaaatcatcaaagccaaaaccaccaatcttaaaaaactggttaaggaaaccgagaaaaaagatatggtttttgcgatcggacccgccggaacgggaaaaacgtatacaagtgtggctttggcagcaaaagctttgagagataaaacggttaaaagaattgttttaacaagacctgcggttgaagcaggggagagcttaggatttttaccgggtgatcttaaagaaaagctggatccttatttacagcctttgtacgatgcgttacgcgatatgattccgcacgaaaagctggaaggttttattgaaaagaaagtgattgaagtggctccgttagcttttatgagagggagaactttggatgatgcgtttgtaattctggatgaagcccaaaatacgacccactcccaaatgaaaatgtttttaaccagaatggggatgaatgctaaatttatcatcaccggagatccgagtcaggtggatttacctccgaaacagcagtccggattaaaggaagccatgagaattctgaaagatgtaaaagaaatcggatttgttcatttaacagaagaggatgtagtaagacaccctgttgtaagaaagattatccttgcttataatgacgaggagaaaagacagcgaaacgattaaacaatttatcataatataattgaaaagcagattaacagttgttgatctgttttttattttttaaacactttattgtaatcattttgatatttaaaaaaaagtgttatttttgcgactgattaataaaaaaactattaactatgaagaaattatttcttttgacagcagtcgctgttatgggattgagcgcaaaagctcaggaattcagattcggacctaaagcaggatattcttattcaacccttaagcttaaagacaactcagattctgaaacatcagatccgttacatactttttacatcggaggtattgcagaatataaagtaagcgacaggtttggtttacagggggaacttttatattctcaacttggagggaaactgaatattgcagaagttgatcctagtgatcctaccaactttttcaatgttaaggcaaaacagacttaccatactttattgattcctgtttctgctaaatatttcattactgaaggtctttcggtttctgcaggtgcaagttttggagttatcctttctgctaaacaaaaatattctgcagatttaggattaggtggagttattccgggattcgaaatcaacagcagcgatgaagtggatatcaaagatcagttaaatactttgaatattgctccattccttggtgctgaatatatgctggagaacggattattctttgatgcaagatacaatatgggagtatctaatttggcaaaagatgcttcaaacggagaaaagttgaccaacagctttttacaggttggagtaggattcaaattcggaggaaactaagaatttattctcataaaaaattaaagcggtacagaatttgtaccgcttttttttatataaaatgctaccacatttttatcattagaaaattcaaaattattaaaatgaaaaaactattattattaggtgcttttgcatttctgggaggtcttactcaggctcaggaaggtttcagactgggagctcatgtaggtgctccgcttggagatgcatccgatgcggcaagtgtaactctgggattggatgcagcatatatgtggaacattactaaaggtcttgatattggtgctgctacaggatattcacactttttcggaaaagataatgtagatgattttgggtttgttcctattgctgtttccggaaaatacagatttaacaagattcctttgtttgtaggattggatcttggggcaggaatttctaccagaaactatatcaacagcggactgtatgttgcgccgagagtagggtatcagatgaagaatacagaactgtatttgggattccagagtgtaagcagtaaatacaaaggtcgtggtccttattggtacggtgatgacagatttaacttcggagcggtgaatttcggagtgaatttcttcctgaaataaatttttttaaaatcaactataatgaactccgattgcaaaattggagtttttttattcaaaaatttgtgaaaacgctaaaggcctttatttaataggttttattgttggaaattgctaaaaaattccgatgatattaatcacattaacaaattttaatattcacagcggtcactgtaaatttgtcgtcagaaagtattaaaattattaaaaaatgaaaaaggtattattagcaagtgctatcgcacttttcggtttatctaatgcgcaaatcgctaagggaactacatatgtatcaggaactttaaattttgctgcaagcgaagataacaatacaaatatcaaaactagtgatttaacattagttcctacaatcggacatttcgttggaacaaacgtagcagttggagttggtgtagggtatgcttcaagcgtagcaaaaaacgaaggtgctgttactacaactaaaaacactctttctgcatttgtagtagagccttttgcaagaaaatactggactttaggtgagaaattctacatcttcggtcagctttcagtaccaatggctttcggaaacgataagcgtgagactacttttgcaaacgcaacaactactacagaagagaaattcaattctttcggtgttgctgtgaagccaggtttagattatttcttaaacaaaaactggactatcgaggctacaatcggagaattcggatacagcaacttcaaatacaagaatgctaaaagtgtagataactacaacttcggtcttgatttggcttctgttggaatcggagttaagtatgttttcgctaaatagaaaatctaaaaactaaaattataagtcctaaaaaaattaggactttttttataaccataaaatatatcaaattaatgtgatttaattatgaaaaaattaagcttattattagcttgcattacattagcaagctgtacacaaaacaatgaggaatttcagaatgaaataaaaactcagaaattagagtataggtttcaggatggaactactgcaaaaattgaaatcgataagtataataatgtgatcaacaaagattctgaatcgtacaaaaaaattgtagcttttgtagagaagtatccaaactttaatctctatgaagattctagccatgttggattgttatctcccgattatgaatctatgattgcatttacgaataaaaatgaaaacaaccaaaaaggagtagttaatcaggtgtgtaatgggtggtttaaattgtatgataatactgattatacgggtcttctttatgagaattcaaccaatcaaaatacagattacgcttttccaaatttagcttctatgggattgacaaataacatttcttcaatgagagttaataacagtgttgtaacgctttatttgtcgtctaattttactatgttacctacgtatgctacaccaacatattcattaggagcaacaggtgcaacagtggaatctaatcttttacttaaaacagtacttgttagagttaatacagctatttttcctgcggggaattggagtgatagggcaaaatccttgagagcaacacatatttgttatgttgaagcataaaaacaaaaaatccggctcaattttgagccggattttgtatttgtaacattctaaagttttaaaaccattctttctggttctgaacatatgttctgtcaaattcttcatcagattttgtaaggtaaatgatcccttcaattaatccaataagacctccgatgcaaagaaggcttaaaagaagttgtataattcctgctttcgtatagcctaagtagaatttgtgtactccgaaccctcctaaaagaattgctaaaattccggctgttacttttttctctgatttgtaaggttgattgtagttcccttgtttttcgttgagttccataataattattttttaatcgttttttttgtgttttatttgccgaacattccgcccattcccggcatatttggcattttgctcatcatctgcatcatctgttttccttgaggaccctgcatcattttcatcattttacccatctgatcgaattgcttcatcaattggttaacatcctcaatttttcttcctgcgcctttcgcaattctgttttttctttgggtgttgatgatagaaggttttcttctttcttcaggagtcatagagtagatgattgcttcaatatgtttaaatgcatcatcgctgatctcaacatctttaattgcttttccaacgcccggaatcatccccatcaaatccttcatattacccatctttttaatctggttgatctgctttaagaaatcatcaaatccaaattcgtttttagcgattttcttgtgaagttttttcgcttcctcttcatcaaactgttcctgagctctttctaccaaggaaacaacgtctcccattcctaagattctgtctgccattctttccgggtagaaaagatccaaagcttccattttctctcctgtagaaataaatttaatcgacttttcaacaacagaacggattgttaaagcagctccaccacgagtatcaccgtctaatttggttaaaacaaccccgtcaaaattcaaagtatcgttgaatgcttttgcagtattcacagcatcctgtcccgtcatggagtcaacaacgaaaagtgtttcatttggcgtaatcacagaatgaacggttttaatttccttcatcatctgctcatcgattgccaaacgacccgctgtatccacgatcactacatcgtggccgtttgcttttgcaaaattaatcgcattctgagaaatgcttgaaggatccatagaaccttcttccgtgaaaaccggaaccccgatttgtccgcctaaaactttaagctgatcgatcgcagcaggacgatagacgtcacacgcaaccaaaagaggttttttatttctttttgtttttaaataattcgccagttttccggagaaggtagttttaccggaaccctgaagtcctgcaataagaattacagaaggctttcctgaaaggttgattccttcttgagaaccacccataagatctaccagctcatcatgaacgatcttcgtcattagctgtcccggagtaagcgatgtaagaacgtcctgtcctaaggctttgtcctgaactcttttggtaagatcttttgcaactttataattaacatcggcatccaccaatgctctacgaatttcttttatggtttccgcaacgttgatttccgtgatttttccacgtcctgaaatattatgcagcgctttgtctaatttatcctgtaaactattaaacatatgtattgtaaattataggtttgcaaaaataaggaaatttttaggatataaaaccgtcttcgacgtaatattatatataaggaataaattttatcagatgataaaaatcaaatgttattaaaatgcgatagaaaaagtctatttttgtgtttaattaaaattaacctaataactgttaggcaaaaattaaatttaaaatgaaagctaatccaaatattctggttacaatattgttttttttaacatttttaattcatttctcattatggaaatttgttttccatcttgatgaaatcataattgttaagttttatctttttttaagcgtaatgtttatgatgatgattacactaattgttttaattaataaaatcgttccgcagtttttagggctttcggttatcggcttgattttattgaaattttgtttaatgtatttgataagaaagaaattaaacttagaaacaattcctgattacagatatcattttattgtaccttattttatccttacagccttgcttacgtactatgcgatcaggctgattaattatgataaaaaacaggaaaattaattattgaaacttaaaaaaatattatatttttgcacaacgaaaaaaacctatcaatgtttaagaaattcgcagttttattctacagtatttttgtgttaaacttagtgtctgcacagcatggtgaggctactgctaaggcaggtcctgctactacagagctttcagagaaagacaaagtaactaaagaaaacaaagagttcatcgatcatcacttattggatgctcatgactttacattgatggtggataaagaaggtcaccacatcggttttcctcttcctgttattttttatgataatggattccatgcttttatgagtaacagcaaagaaggattcatgcacggagaaactacagaagtagatggatcttattataaattacatcacgaaaaaatttataagactgatgcagctgggaaattatctttcgataaagacggacatccagaaaatgaaaagccgttagatctttcaatcactaaaagtgttttaattattttcctagtggcggttgttatgtttttgttatttactgcgatggcaagatcttataaaaaatctcaggttcctaccggtgtcgctaaattcttagagccattagtgatttttgtaagagacgaaattgcgatccctaatatcggacataaatataagagatatattggttatcttttgacagtatttttctttatactgttcttgaatgtgttaggtttaatgccattcggaatcaatgttacaggtaatattactatgacgttctttttggcaatccttacttatttagttaccacattttctgggaacaaagattattggaaacatattttctggatgcctggagttcctgttccaatgaagttcattatgttgccaattgaattgttaggaactttgactaagccattcgctttaatgattcggctttttgccaacatgacagcaggacacattgtggtgatgacattgattggttcaatttatattttcaataactggattgcaggagtagcatttcctttcttaacattagttatctatttattagaagttttagtagcattcttacaggcttatatatttacaatgctatctgctttgtttattggaatggcagttgaggagcatgaacatgaacatcatgcagctcactaaattaaaaataaaataaagtaaacaaattttttaaaattatatattatggaaatccctagaattattggtgcaggtcttatcgtacttggtgtaggtatcggtcttggtaaaatcggagctgctgctcttgaagctattgctagacaacctgagcaatctggaaaaatccaaactgcaatgcttattgcagctgcacttgtagaaggtgttgctttcgctgcgttattcgcatcataagctaaaaaaacaaaacattgttgtagcggttggctacaacaatgttaattttaaaaaaaagtaataattatttatacatttatataatggaattaattcatcagttttcatcaggattatttattatccagtctgttatttttctggcattgttattcttgttaggcaaattcgcttggaaacctattttaaaatctattaatgatagagaaacttctattgttgacgctcttaatcaggctactttagcaagaaaagagatggaaactttaaaagaggataacgaaagaattattcgtgaggctaaaatcgaaagagatgccatccttaaagaagcaagagaaatcagagataaaatcgtaggtgaagctaaagatgttgctaaagtagaaggagataaaatgattgaagcagctaagcaaaccatcaatgctgagaaaaatgctgcaatggcagatatcaaaactcagattggtactttatcagtaaacatcgcagagtctattttgaagcagaagttagacaacagcgaagctcaaaacgaattagttcaaaattatttaaacaaatcaaaccttaactaagaatgcttacatctaaagtagctaaaagatacgcacaaggtttacttgacttcactaacgaatcaggtcaaacggctactgtattttctgaaatgaaagatgtagtaaagatcatgaaagagtctgcagacttaaacaaatttttcatgacaccttacatcgattctaaaaagaaagtagaagtagcaaacgaaattttcaaaggtttatcagcttcttcacagaacctgattactttggtaatcaagcacggtcgtgaaaaccagttgaagaatattgctcaggagtttatcaacaaagttgaagatatcaatggagtacagagagtaacggtgactactgcgacgcagctttcaaaagaaaacctggaggaaattttaagaaattccaatcttgttaacaccaatgcaaactttgatttgcagttgaatataaagcctgaaattttaggaggttatattttaagagttggagaccagcaaatagatgcttctgtgaagtctaaacttaacagtattaaaaaagattttcatttaaattaagaaaaaacaaccatacaatggcagaaataaatccggcagaagtatctgcgatcttaaaacagcaattggccaacttcgatactcaatcaaacgttgaggaagtaggtacagttttaaccatcggtgatggtattgctcgtgtatacgggttagaaaacgtacaatacggagagttggtgaaattttctagtgatgtagaaggtattgtactaaaccttgaagaagacaacgtaggtgttgcgctacttggtgaaagtaaattagtaaaagaaggagatacagtaagaagaacaaacagaatctcttctattaaagtaggagaaggaatgttaggaagagtagtagatactcttggtaaccctatcgatggtaaaggtcctattactggggatttatacgaaatgccattggaaagaaaagctcccggagttatttacagacagccggtaaccgaacctttacagtcaggtatcgttgcaatcgactctatgatccctgtaggaagaggacagagagagcttatcatcggtgacagacagacaggtaaaactactgttgcaatcgatacgatcatcaaccaaaaagaattctttgatgcaggtaaccctgtatattgtatatatgttgctatcggacagaaagcgtctactgtagcacaaatcgttaaaacactttctgataaaggagctttagcatatacggtaatcgttgcggctaacgcatcggatccggttcctatgcaggtatattctgcaatggcaggagcggcgatcggtgagtttttcagagacaccggaagaccagctttgatcgtttatgatgatttatctaaacaagcggttgcttaccgtgagctttctctgcttttaagaagaccaccgggtcgtgaggcatatcctggagacgttttctatcttcactcaagattattggaaagagctgcgaaagtaattgcggatgacaatatcgcaagacagatgaacgatttacctgagtctttaagaccaatcgtaaaaggtggaggttcattaacggcacttccaattattgaaactcaggcgggtgacgtttctgcgtatattcctaccaacgtaatctctattacagacggacagatcttcttggagtctgatctattcaactcaggggttcgtcctgcgattaacgtaggtatctctgtatccagagtaggaggtaacgctcagatcaaatcaatgaaaaaagtttctggtacgcttaaattagaccaggctcagtataaagaattagaagcgtttgctaagttcggttcagaccttgatgctgctacattagcggtaatctctaaaggggaaagaaacgtagaaatccttaaacagccggtaaactctccacttccggtagacagccaggttgcaatgatctatgcaggaacagagaacttattgagaaacgttcctatcagaaaagtaaaagaattccagatagaatacatcgagttcctaagatctaagcatccggatacaatggctgccattaaagcaggaaaaattgatgattcaattacaagtgttcttaagcaggctgctaacgatctagctgctaaatataactaaaaattagttgatggtttttggttgatagttgacagaattttctaaaactagcaaccaacaaccgacaaccaacaactaacccaatatggcaaacttaaaagaaatacgaggcagaattacgtcaatttcatctacgatgcaaattacccgtgctatgaaaatggtttccgctgcgaaacttaaaaaagcacaggatgcaatcgtaatgttaagaccttattctgagaaattacaggaacttatccagaatgtaaattccagttcagatcctgatcagatttctgtttacgctcagaaaagagaagtaaaaagaatacttttcatcgctattacttcaaacagaggtcttgccggagcttttaactcttccatcgttaaggaactgaatgcacagtttcaaaacaaatctcaatacgaggtggaagttctttctgttggtaaaaaagcttttgatgctgtaagaagaacgcgtacggtgtatgcaaacgaaagtgctgtgtatgataacctgaacttcgatgcggtagctcacattgcagaagcagtaatgggcagcttcaaagaaggtaaatttgatgaagtttatttaatttataataaattcgttaatgcagcgactcaggaagtaactacagaacagcttcttccgatctcaatgcctgaaaatacagaatctcaggtagaaacagattatatctttgagccaaacagagaagaaatcttagataaccttattcctaagtcaatcaagactcaggttttcaaagcaatcctggattcagtagcttctgaacacggagcgagaatgacggcgatgcacaaagcaacagacaacgctcaggctttgaagaacgatttggtcatcttctacaacaaagcaagacaggctgccattacaaacgaaatcttagagatcgtttccggagcagaagccttgaaaaattcgtaaagaattattttaacacaatattaaagcatcgtaaatcacgatgctttttttgttatttttattttgtatatatttgtagaactaaatttatataatttctaaatggactcggacatagtcaggcttttgctggccttattacttgttttacttaatggctttttcgtagccgcagaattttcaattgttaaagttcgttattcacagattcagataaaagccgcagaagggaattctatggcaaaacaggcagagcatatcatcaagcatcttgatgaatatctttcggctacacagcttggtatcacgttggcttccctggctttaggttgggtaggagaaagcgcgttacaccatattgtagaaaatattttccattcgcttagtattgatcttagtcaggcaaccatcacttccatttcggtgattacaagttttgtactgattacgatcatgcacattgttttcggagagcttattccgaaatccattgccatcagaaaatcagaatctactacaatggcgactgcaattccgttaagagttttttatacggttttcaagccttttatttggttgatgaatttaatgtctaatacatttttaagactggtaaaaattcatccggcttcagaacatgagatccactctacggaagagcttcagcttttggtaaaacaaagcgccgacagcggagaaatcgaagaggaaaattatgagatcattaaaaatgcatttgattttacagatcattctgcaaaacagatcatggttccgcgtcagaacattacttccatcgattttgaagaagatattaatgaaatcatcaataaaatcatggaaagcggatattcccgtattccggtctacgaaaattctattgataacgtgattggtgttttgtatactaaagaaatcatcagagaatttgtaaaaagaaaaggcgaactgaatcatgaagatcttaaagaactgatgcgtgacgcatttttcgtggtaggaagtaaaaagatttcagacttattgaaaattttccagcagaaaaaacagcatttggcgatcgttatcgatgaattcggaggaactgaaggaatcattacccttgaagatattttagaagagttggtaggagaaattcaggatgaagaggatgaagaggaaaaaattgtagacaaaattggggagaatacttactgggttcaggcaacacagccgttggacgagattaatgaatttattcctaaaaaattaccgctttctgaagaaagtgagtataatacattagcaggctttattcttcacgctttagccgacattccggaagaaaatcaggaatttgatctggaaaattatcatttcaagattcttaaaatgaacaataaaagtgtagagcttgtagagttggtatatgaagaacccaacagcattagtgatcttgccgaaaaaataggagaagtttaattttaatctattgtaaacaatttaaacatgattttttataacagtataaaagattacgaagatccgaaacgtcagtacgaagaagaagttctcgtattggatgagaccgatgaagtctataaattggttttgcataacgatgacgttcacacatttgattatgttattgattgtctgatcgagatttgcaaacacacgttagaacaagccgagcaatgtacaattcttgttcattttaaagggaaatgcacggtaaaaacaggttcaatggatcttttgaaaccaatgcatgaaaaactgctatcaagggaattaacaagcgaaatcgtataaaattgatcagctccgactattgtcggagttttttttatgagatcagtcaattatcgattcattagaagccgtaagctaaagtggaatttatgatcctgtgtttttgtacagtattttttctgaacaatttcagcttttaatatttatttgcattcaagtaaaatagtatatttgtaaaaactataaagaaacaaaaataatgcttgtaataggaattgcaggaggtacaggctccggcaaaactacggttgttgataagatcattcagcagcttgacatcgaaggaatgaacatcctttcacaggataactattatcatgataatcataatcttacattggcagaaagagaagccttaaattatgaccatcccaaatccatcgattttgatcttctgataaaacatgtaaaagctttaaaaaataacgaatccattgagcagccgatttacagctttgtaacgcatggaagaacaggagatcacgttaccgtagaacctaaaaatgtattggtagtagaaggaattctcgttcttaccaacaaggaattattgaaggaatttgatctgaaagtttttgtacacgcagattcggatgaaagacttatcaggaggatcagaagagatacacaggaaagaggaagagatctaaatgaagttctgcaccgttatcagacaactttgaagccgatgcatcaggaatttattgaaccttccaaaaatgaagcggatcttatcatcccgaatatgagacagaattccgttgcgatagattttttaaccaccgttattaaaaactcgttgagaaaacactagaaatgaaagaaaataagcttattaaagacattcagcccaagtctgaaacattcaaacttattcagaaatattttttgaataaatataccattacaatctgtctgtttctggtatggatgattttctttgataaaacttcctttcttgtcatcaatgaactaaacggcgaaatcagcaaatacgaagaacagcttcaatactataaaaccgaatacgaaaagaacgatgcgttttataaaaagctgatgaacaacaaatctgaaaaagaaaaatacgcaagagaaaactacttcatgaaaaagccggatgaagaaatttttattctggtagttgacagcgcaaacgcgaaaaaataattttttttaatgaattgtcaataatgaattttgcttcgcaagtaaattttaaaaaataattgttcttcattcatttatcatcattgaaaaatctttgcgttaggattataatcaagtaaaaattgatgaataaaagcggattgactattgaccattcacaaattcatacaaaaactatgtcaaatacagcctgggaaaatttagtaaaaaaacagcttaaaacagacgatatttatccaatccttagcaaagaaaatctggaaggaattgtggtgaaacctttctacgattctgtgcaggaaccattggtaaatctgccgaaaattgaagaaagcacccatttggtagcaaaatatcatgaaagtttggaagaagatgtttttgcctttattttagaccaaaatgtagaaaacctcgaacagaaaacaattttcataaacaatgaagaactggcaggacacatcagtcccgaagaacaagaccagtacttttcactaattgatgtttttgatgaaaaacaagctgtaattaacgatcagttggtcaaagaattactcgcaaaacagttcagaagaaatatttgtatagatatttcccttcatcagaacgctggagcctctattgttcagcaattgggaattgctttggcaaaagccaaagaacttgtagaaatctacggttcagaaattgtaaacaaactcatcttcagaatagcagtcggtggaaactacttcttcgaaatggctaaactgagagcctttaaaatagttttcaatcaattgtcaaaagaatacgatcttgacgaaattccctacatttttgcagaaacttccctgagaaataaagcggtttccgataatgaaaataacctgatccgctctactcttgaactggctgcagccatgatcggcggagcagatgccgttttcagcaataattatctggtagaaaaaagtaccgagaactcagaagaaatctccttcaaacagcagattgttcttgcgtatgaaagcatcatcaatgtttttgaagatgcatctaacggaagttattatgtagaagatattacacggcagattgcggaaaaatcttgggcattttttgtggaaatagaggagaacggaggttatctcgagcttttgaagcagggaactgttcagaaaaaaatctacgatcacgccattgaagaacagaagtgggtggaagaaggaaaaataaagctgattggcgttaatttatacccgaaattagacgttaaaaagtctattgaggaattatacagcgaaaaagaaattaaagccgttcgatgggcggaaatgtttgagtaattcttgaaaatatcatgaaaagatagatccattatcaccagatacaatgctgttcaaaaaagaatctgatttgtaacttagtatgaaagaaaaattagttgatttattcgaatatacttatcatttcaacaaagaaatgattaaaattatttctgaaaatcttgaaaaggttgatgaaaaaacaatcagtcttatcaatcatactttaaatgcccaacaaatttggaattcccggattttaaatgaaaaatcttttgaggtttggcaaattaatccttttgaaaatttaaacgggattaatcagcaaaactttaataaaagccttgaaattgttcagaaatttgatccggatcaaaaaattgaatatcagaattcaagaggaacaaagtttgaaaacacagttttcgaaatgctttttcaggcaattaatcattccacttatcacagaggacaaatcaatacgttattgaaacaaagcggaattactcctattttaacggattacattttttataaaagataaaaaactttgaaaaaagaaattttatatcaggaaattcagcaatttatcaatgcaaatctaaacgcagatttgcattctttgttattaaaaaaatccccgtttccgaaagtttctatacaggaaattgttcagcagatcaaaggaaagcaggttgcacagaagaaattttcgtttctgcttaaagaaggaattatttttccgccacaactgaatttagaacagtcttcctccgaaaaaacagcattgtacaaatctgagatcttaaaaggtaaaaagttcatcgatttaaccagcggctttggaattgatgcctattatttatccgaaaattttgacgaagtaactttggtagaacaaaatgctgagcttttggcaattgttcaacacaattggaacattttaggaagaaaagcaaagtttgtcaaccagaacctcgaagattttttaaatgaaaatacagaaactttcgatgtaatctatctcgatccagcgcgaagagaccacaataaaaataaagtttttttactcgaagatctttcgcctgatattattgaaatccaagaaaaactactttctatctccaatgaggtcgtgataaaactttcgcccttaattgatctgaaatatctggtttccgttttacccaaccttttcaggattgatattattgccttgaaaaacgatgtcaaagaagtcgtcgtatttctgtccaaacaaaattcagacaaaattatctgtcattgtgtaaaccttgaaagtgaagaatcgatgtttacatttacatttggagatgaagaaactactgttgcagagtttggtgaacctgaaagatacatctacattcccaataattcggttttaaaagccggaatttttaatgtaatctcagaaaaattcagattaaaaaaattacatccgaatacacatctttacacgtcaaatcaaaagataactgatttttccggaaggattttagagatggaagttgttgaagctaaacagattgttaagaaaagtcagttcaatatcatttcaaaaaattatcctctaaaaccggaagaaattaagaagaaatacaacctgaaagacggcggagaaaactatcttatttttacacaatccaaaaaaggaaaaattatactaaaatcagtataaaaatgttgccgaaaaaaataggaatccttaattttggacaattaaaaattaataagaatcgtctttgttaatctatgcaaaatgattctgctgatcttaaaaaaataaattttacatatgaaaaaattagttatatgtttagctcttgctactgttgctgtaagctgtaagaaaattcaggccggaggaaacaagaatactctgaaacttgaagaaggagcagaaagatattcagacgatcctcaaggtgaaggtcatggtcatgaagctgccacaatgcatacagaagaggcaactgcagaaaagcacgaaaccgaagcgccaaaaacagacagtacagcaactgcaaaacctgccgaagctaaagaagctccaaaagctgaacactaattaaaagtacaatataaaatctcccgcagcaatgtgggagatttttttaggagctgtttcgcgctttccgcactcgctattttctgggtttcggcgcggcgaagccgcgccgaaacccagaaaatgagctcagacaaatgctgcaatcacggctaaactgaggtctgtcagtcaattttagggataaaataccattcagattaagatttttcgacaacacacttcagacctgaggaaaattatacgtttttgtttgttcctgagaagcaaattttttacttttagcaaaataatattttacaatgcaagagactttaaattacatcagcgaaaacaaacagcgtttcgtcgatgaattatttgaattactgagaataccttccatttctgcagatcctgcgtataaaaacgatgtgctaaaatgtgcggaagtagtggcagaataccttaaaaatgcaggagcggataacgtagaagtttgccagaccaaaggatatcctatcgtttacggagaaaaaattttaaatacagatttacctacggttttagtctatggacattatgatgttcagcctgcagatccgttggaactatggacaaaaccaccattcgaaccgtatatcgaaaaaacagaacttcatccggaaggagccatctttgcaagaggttcggcagacgataaaggacagtttttcatgcatcttaaagcttttgaagccatgatgaaaaccaatgcgcttccttgtaatgtaaaatttattctcgaaggagaagaagaagtaggttcggtaagtttaggagactgggttaatgaaaacaaagaaaaactttcttgtgactgcattctcatttcagatactcatatatacagcaacgaacagcctacggtaacaacaggtttaagaggattaagctatgtggaagtagaagtcgagggtccgaacagagacctgcattcaggactttatggcggtgccgttccaaacccgatccatgtcctgtcaagaatgattgctaaactaattgacgaagacggacacataacaatcgacggattctatgataatgtagaaaccgtttcagattcagaccgtgcagatatgaacaagctgaaagataatcctgaagaattcaaaaaatctatcggattaaacggtgtggaaggagaaaaaggatataccactttggaaagaacatctatccgtccaacattagactgcaacggaatttggggaggttataccggagaaggagcaaaaaccgtaattccttcaaaagcttttgccaagatctcaatgcgtctggttccttatcagactccggaagaaatcaccgaaaaattcacaaaatattttgaaaaaatcgctcctcaaaatgtaaaagtaaaagtaacgccgcatcatggaggaatgccttatgttttaccaaccgataccaaagaatttttggcagcaaaacaggcaatggaatcagccttcggaaaagaagtgcttccatacagaggaggaggaagtatcccgattacagctatgtttgagcaggttttgggagctaaatccgttttaatgggcttcggattagactctgatgccatccattctccaaacgaacattacggattattcaatttttataaaggaattgaaagtattccgttatttttcgagaattattccaggtaaattttaacaatcaataaatgagtcccttagatttttttctaagggactttttttatatatttagcatgctaataaattaattgaaatctaatgaaaaaaattctactttttatttccggaatactttctataggcagtatttacggacaggttattgacagccagaattttaacagcttaacgccaggaaatgtcgggacaaactttacaggggcttctgcaggacagggtggctattatcttttaaacggtgttgcttcagattatcagattgctactattgacgctgctcatgcaaattcattaaaaattacagcgggttcaggatatgtagcgacaagcgatccaaataaccattctgtggttaaactggtaggagttaatgctacagcaggaaatgatattatcaaagcgacctgtaatttttatacaggatctgcaaacggtacaggatctgtgtacattacgctttttgatgacgcaacaactcccggagtaatcgtaagtcttatttacaatgtagctaccaaaactataacagcaggaggtacattaaccaatgccggaacaagaggtttctttggtattaaaactttaggaggaacctaccctgcgaatacgtgggttaatgtaggaatggcgtataatatgacgaccggagtaatgaattggtatactccacaggaaagttacactttctctactcctccttcaggatatgccttaattcctgctttggatgtggggcaataccgtacttataatattaatgcttcaggaaattctgtagcttataactgggcaattgataattttaatttatcttattccaataatacaattcttgctactaaagaagaagtttctaaagcaaaagaagatatcttcatctatccaaacccggcaaaagatattgtaaccattgaaggtaaaaataaaatactttcagtatacgtttatgatctttccggaaaaagaatcgatcttcctttaagcggaaataaagtgaatgtttctggcttggcaatggggaattatgtattgggaattaaaacagatgaaggtgtggttactaaaaaactgattaaagaatagaaaagtaatcggttatattaaaaaaggctgcattatcataaatgcagcctttgtagttaaaatactacttaaaaatgtggtattaacattatattttaaatataattgctttgttttcaaaatattattaatatatttataaaactaaattttaatgatatgagaaaaattttactactcggctcaattctgagcctggtctcaatgaatgcgcagaccaacgtttacagctatggttttgataccgctttcacaaattggacaacctctaatcaaagcagtccggtaaccacttcgatctggacaaaagcaacctatgcgacccctcttacaaatcccctgttcgggagcggtaataccactactgttcctgtaggacaggcaggaggtgccaattcttttgcgttggtaaattacacaagtacatcaggagcggggacaatcagcaactggttatttacaaatgccatagacgtaaaagatggagatattgtgagcttttattccagaaagggaacagacggaacgatagattatcccgatcgtctggagctgagatacgcattggcagccggtgcggttcttcctacaacaggagcttccgctgtcggatcttttaccaacttaggagtatctgtgaatccaaatctggcttcaggttttgtttatcctaaaacatggacaaaatacagctttaccgttacaggagtaggtgcaaatccggttccggtaagatttgcctttagatattacgttacagacggaggaccaagcggaagcaattcggatcttataggaatcgatactttttctattgacagacctacattatctaccaatgatgttgccttaaatgaaaaaagcatatctgtatatccaaaccctacaacagattacatatccatcaaatcggcagacaaattcagcaatatcgaagtttttgacattgcaggtaaaaaagttgaggtaaaagtagaaggagacaagataaatgtaaaacatcttaattccggatcatatataataagcatggagtcgaaaggaaataaaatttcccagaaattcatcaaaaaataaataaattctatattgttttcaaagcgcttctactcgagcgcttttttatttgatctaataaactgacaaatgttaggcaataaaaattactttatttaaagcatttttgttatttttaagaacttaaattcgcaataatatgatcaaagataaagtagcatatatcacaggtggaacaaagggaattggtttcggaattgccagaattttacttgaaaacggagtttcagttgcattttcgggaagaaaaaaagaagatgtagaaaaagctgaacaggaattaaagcggatttctgaaaatgttctgggaattgtatcggatgtaaaaattcttgagaacgaagaaaaagcggtacaacagacaaaagagaaatttggcagactcgattttgtgattgcaaatgccggtttgggaatttttaagcctgttgatgagctttctgctgaagagtggaatgatatgattgaaacaaatctgacaggtgttttctatacattaaaagcttccgtggaagaactgaaaaaaacagaaggatattacatcaccgtttcaagtctggcgggagcgaatttcttcgaaaacggaacaggctataatgcctcaaaatttggagtagtaggtttcacgcaggctgcaatgattgatttgagaaaatacaatatcaaatctacggtaattatgccgggttctgtagccacgcatttcaacggaaatattccttcggaaaaagacgcatggaagatccagcccgaagatatggggaatctggttttggatattttaaaaatgaacccgagagttttaccgagtaagatcgaatttcgggcaacaaaacccgctaaataatgactttaatgcattgaatagtaaaataataagtactatgcatgcataatatattttttatttatattagcgaaacataatttaactgaaatttaaagtttctttaaattttattgaagcataaaaaatagtacacatggaacctaaaagtttcatctgaccattaaaacaataagaacaacatatgaaaatattagtttgtataagtagtgttccggatactacttccaaaattaactttacagcggataaatctgcattcgacaaaaacggaattcagtgggtaattaatcctcttgacgaatttgcgttaacaaaagcaataaaattacaggaatctcagggggcaacagtaacagtaatcaacgtaggagatgtttctacagagcctgttgtaagaaaagctttggcaatcggagcaaacgatgccgtaagagtaaatcttgatcctaaagacagtttctctacagctaaagaaattgcagcagttgcacaaaacggcggatacgacttaatcctttgcggtaaagaatcgatcgattataacggaggttctgttccgggaatggttgctcagttattgaaccagccttttgtaaatgcttctgtaggtttagaagtaaacggaagcgaagctactgctgtaagagaaattgaaggaggtaaagaaaccatttctgtaaaattaccggctgtaatcgcgggtcagaaaggattggtagacgaaaaagatcttatcattcctaacatgagaggaattatgtctgcaagaacaaaacctttgcaggtagtggaacctacttcttctgaggtgaaagttcagggagtttcttatgacagcgttccgccaagagctgctgtaaaactggtttctccggataatttggatgaattggtaagattacttcacgaagaagcgaaagttatctaatattgaggctaagactgagttttagatttaaattctaaatcttagcctaaacctaaacctttaattttttaaaattcaaaaaatggcagtattcgtatacgcagaaaatataaacggagtttacaaaaaagcggcttttgaagcagtttcttatgctaaagctgttgcagatcaggcaggagataccgtaacggcaatctctgtaaaccctacagattcttcagatctattgtataaatatggagcatcaaacgtaatcaacatcaaagacgaaggtcttaaaagtttctccgctaaagcttacgctcaggcggtaagtgaagtggcagacggaaacatcatcgttttccctcacacaacagatgcttcttcaattgccccgatgttggcagtaatgaacggacattctttagttacgaatgtactggaagctcctgaaagcctttctccgtttcaggtgaaaagaagagctttttcaggaaaaggatttatgcatgcaaaagcagaagggaacggagtcattgtaacagtatcccaaaacgctttcggagtgaaggaaagtacagtttcaggttcagaagaagtaaaaaatctgtctgttgcaaatgacgatactaaagtaatctctcacgaacagagttcaggaaaattagacctaaaagaagcggaagtagttgtttcagcaggaagaggaatgaaaggtcctgaaaactggggaatggttgaagatcttgcaaatgttttgggtgcagctacagcttgttccaagccagtttcagacatcggatggagacctcactcagaacacgtaggacagacaggtaaagcaatctcgcctaatctgtatattgctatcggtatttccggagcaattcagcatttggcgggagtaaactcttctaaaaccatcgtggcaatcaacagtgatcctgaagcaccattctttaaatcagcagattatggagtagtaggagacgctttccagattatccctgcattaacagaaaaaattaaagctcttaaaggataaaaaaagtgaattgataatcgtcaattatttcagatataaatttttaatggatatctcgaaaaattcacttacgaagtaaaattggcaatgtcgttaattcacaattcgcatataaaagcccatttcgggcttttatttttgtctaaaaagtaaaaaaaactttgaaaaattaatctatatttgtagctatggattataaacagttaattatacgcgggatatcgtacagccagacacaatccggggcgtacgcactactattggaacatgaagaaacacatattaaattacctgttgttatagggaattttgaggcacaatccatttctttgggtcttgaaaaagacattcatccccctcgtcctcttacacacgatttatttacaaaatttatacattctgtaaattacgaacttgtttccgttatcatctatcagattgtagacggcgttttcttctcaaatatcaactttaaaaataaggcaaccgacgaagagcttatcttagatgcaagaacttccgatgcggtagccatggcggtacgatttgatgcacctatttttaccacacaacaggtgctgaacgaagcaggaattcttctggaactggaagatgtatccaaagaagagcagtcattttccgaaaccgttcaggcagaagataatctgaaatccatttcaatggaagaattgcagaagttattggatgaagcggtgaaagaagaagattacgatactgctcttgaaattcaggaagaaatcaggaggagaaagaaaaaaattgactaaaagagattatttatactgacttatgaacttaaaattacgactgaccatcttaagttttctgcagttcttcgtttggggagcatggctgattacgatggctaatttttggttcggtacaaaacattgggacggagcgcagtttggtgctgttttcggaaccatgggaattgcttccatttttatgccgaccatcaccggaattattgccgaccgttgggtaaacgcagaaagaattttttcagcgttacacattttatacggtattgtgcttttcattctgcctcactcggcggatcccggttctttctttacggtaatgcttgttgccatgtgcttttatatgcctacaattgcattagccaattcaatatcttatactattcttaaaaatagtgagttggatgtggtaaaagattttcctcctatccgtgtttggggaactattggttttattgtagccatgtggattaccaatcttacaggaaacaaagctacggaaggacagttttatattgcaggagcggttgctgttttcttaggaatttacgctttaacattaccaaaatgtcctccacaaaaattaatagacaaagaagcaccattgtcggagcaattaggcttaaatgcttttaaactgttcaaagattacaagacagctttgtttttcttattttccatgcttttaggagcggctttacagcttactaatgcttacggagacgtattcctgagtgaatttgaacattttccgaaatatgcagactctttcgttgtgaaaagatctaccattattatgtccatttctcaggtttctgaaactttatttattttggcgattcctttctttttaaaacgatacggaattaaaaaagtaatgttgatttcaatgtttgcgtgggttttaagatttggtttctttgcttatggtattccggaaggatttggcttaagtttaatcattctttcctgcgtggtttacgggatggctttcgatttcttcaatatttcgggatcgctttttgtggaaaccactaccgataaaaagatccgttcctcggctcagggattattcatgatgatgacgaacggtttcggagcggttttcggaagttatgcagcaggctgggcaatcgataaattcttcacccacacatttactaccgcttcttcactggcaaattatcttgaaacaacaccggacaaccagacttttttaggaattctgcaaaagagtttcaattctgcggtaaatccggacggaacgttatcttctattgtaatggtaaaagactggcataatatctggctttctttcgcagcctatgcgttggttttagctcttttatttgctgttctgttcagacacaagcatacccctattcagacatcagatatcaaacattaattttatcgtattgataacgaatatattaaattgcactttcaaaaaaagtgcaattttttttgatagtcaggcaaccctttcaaaaatctttcatcttataaacagaaactaattaatgaagaatttagaagagaattttaaactggcaaaaaagcaggatcggagaaataagaaaacttttaaattaaaattcttaaaagtaaaatagcaatcagataaaatatagcaagatattccagataggttaaatattttctttttttggaaaaaaattttctttaaacacggttctcttaatattttcgtgaaaaaagatttcacacccatatttaacgatcaggcaaaaattaataacaaatatggcgttcagataggattggagctgttatatatcaatttttaatatgaatcttcatcatagaaaaacacactttttggagtgtgtttttttttgtattttggcactttaagaaatatgaaaaatattcagttattaggattgatattggtggttgcaggaagttttctgccgcttgttcacgttccggttatcgggaactggaactattggaagctcgatcattctctggcagtaatctgttggatactttccgcaggagcgctgttcggaatagccaacaacaaggcaaaagtttcgaagatttttggagttcttttagtcgttctgtttatttttacactcatcgctgtaaaacttcaggcttcagattacttcagctttatgccgtttaaatcttggcaggataaacttgctggaatagttaagttaaaatggggctggatattagaatttttaggagcattcatcatcattttagttaaaaataataaagtaaaagcataattcacgtatgaatttttttaaaatattttcgatcggagtattttttttgggtgcatcttacgtaaatgcacagacgaaggtaacagcaaaaaataaacctgttgacaatcctgcaaaatgcgccaacatcaaagaaggaaaattctttagaatgaattatcctcccaatctctggtatatgaccgtaaaagataatatacagaccgaatattataacgacggtaaagattttataaaattatccatggtttttgtaggggactgcgattataaattagttgttgttgaaaaaagtgaaaaagaacatcccataaaagtaggcgatgttttaagcaataaagttcttgccacgcaggataattatgtaaaaatccagtcaaaattcgagaacgatacctacgattttgtcttggtaaaggtaaaagaaaataaaaaataaacagccggatcatataattcggcttcaactaaacgtaaaaaatagaattataaaaaatgaaagaagtattcatcgtttccgcagtaagaactccgatgggaagttttttgggaagtttatcagcagttcctgcaactaaactgggagcagttgctgtaaaaggagcattagacaaaatcggtctggatcctaaacaggttcaggaaatctatatggggaacgttttacaggcgggagaaggacaggctccggcgcgtcaggttgctttgggagcagggctttcaaacgaaacgccttctactacggtaaataaagtttgtgcatccggaatgaaagcagtttctatggctgcacaggcaattaaagcaggagatgcagacgtaattgttgcaggagggatggaaaatatgtcctcagttccacattactataacgcaagaaatgcggcaaagttgggcgatgtaaaaatgcaggacggaatggttctggacggacttacagacgtttacaacaaagttcacatgggagtttgtgcagaaaaatgtgcaacagattatagcatttcaagagaagaacaggataatttcgccatagaatcttacaaaagagcagcaaaagcctggtcggaaggtaaatttgccgatgaggttgtccctgtggaaattcctcagagaaaaggagatcctgtcattttcgcagaagatgaagaatataaaaccgtaaatttcgacagaattccttcacttcctacagtattcaaaaaagaagaaggaacagtaaccgcagcaaacgcttctacattaaacgacggagcttctgctttaatccttgtttctaaagaaaaaatggaagaattgggacttaaacctttggcaagaatcgtttcttacgcagatgcagcacaggctcctgaagattttacaacagcaccttcaaaagctttacccattgcgcttaaaaaagcaggtttagagcttacagacatcgattttttcgaattcaatgaagctttctctgttgtaggtttggcaaacaacaaaatcttaggattggatgcttctaaagtaaacgtgaacggtggagctgtggcaattggtcaccctcttggaagttcaggatcaagaatcattgttactctcattaacgttttaaagcagaataacggtaaatacggcgcagcagcaatctgtaacggaggtggcggtgcttctgcaatcgttatcgaaaatatgcaataatcattgatattgatatattcagaatccggaagtttttactttcggatttttttttggagctttttcccgctttccgcactcgctattttgggattcggcggcggcttttgccgccgccgaatcccaaaatgagctcagacaaagctgcaatcggggctaaaattccagccatccatagaaattatcggtaaaaatcatttgaaaggttaaaaaacttttaaaaattaaactcaattaaaaaaatataatgcctaattgatgtagaacgttttttcgtccgaaaaatagtcaggcacaataggaaccattttcagataacttacgcatcctgaaaaaccattttacgtacggcaactttaacccaataataaaatttccttcaaacaaaataaaaaactacgaatattcagcggttttgctatttttgtgtttattaatatttatttgaaatgtctgaaattgagaacctgcaaactcaaaacataaagaataatccaaagatcatgaaagcctgggcggtttatgactgggcaaactccgtttattctttggtaattacttctactattttcccaatctattattccattcttaccacagcgtacgaaaaaaaagaatatgtggcggcaacaaaatcctggattgatgtccctgtaagacacatgattaagatcttcggaaaagaatatcaacccgatgccgtgtacggatattccttaacgatttccttctttatagtagttttgttatctccgtttttatcttctttggcagatacgatcgggaacaagaaatctttccttcagttcttctgctatctgggagcaacttcttgtatgggattggcaatgtttaccggaatgcacaacgtattcttaggattactcttcagcattaccgcgagtgtcggattttggggaagtctggtgttttacaactcctttttacctgatattgcgacaagagacaaacaggatgcactttccgcaaaaggatacgtttacggatacatcggatcggtagttttggtaataatctgtttgcttttaattcaggtttttgcaaaaggtgctgcacaacagttgctgttcacaagaatcagctttttattaaccggagcttggtggtttggtttttctcagtataccttcaaacatttgcctcagttcggggatgtgaaagaaaaacttccaaaagacttagtccttttaaactataaaaacatcttcaaaagacataaagaacagggtgggttcttcgaagttttaaaagacaatttaagcttctataaagatattgctaaagaaagttttcatgaattatttaaagtaggaaaaggtcttttcaaggatagaaacctgaaatttttcctttccagcttctttttttacagtgtaggaatgcagaccattttcctgatggcaaccctgtttgggaaaagtgagatcaatcttccacaggataaactcatcggaacactcttggtcattcagattgaagccatcatcggagccgtaattttctcaagattatccagaaaaatcggaaacaaaaatgtcatcaccattgctattattctttggattgttgcctgcatctgggcatatttccttaacaaagaaaatcctacagtagagtatcagttttatggcgtagctgctgtggttggtttggtaatgggaggacttcaggcaatgtccagatctacctattccaaacttttaccagaaaactcaatggaaaacacaacgtttttcagtttttacgatgttctggaaaaaattgccatcatcgtgggaacatttgtttttgctttatttatcgataaatatgattctttacgcgctatcttcgcgaaaattgatgtcatgctgccttccgcttcaggaatgagatttgcggcattttcaatggcattgtttttctttgtaggattaattttaatacgatttttgaaactcaatacccagaaaaaataattgaaattatatttttaaaaaacttaagacgctgataaagcgtcttttttattttatcgtcatgagaaattatatattttatggtataattaaatttttcattacttttaacaattaaaaaatgtgaaaatattattatttattcactgtgttttgattttttttgtttatttgcaaatctaaataaatcgttaaaatgattaagaaatttctaactctctgtattttgcagtctgcagtttttggttttgcccaaaacatgagacctgtagcccaaaaagtatcggaataccatacccaaaagaagaactttgaaaagttcgatttattcaccatcaacaaaaattcagaaaaacttgccgaatacaaaagagcggcaaccgatatttctgtgctgaatattgatgcgaaacagcttaaaaagttagttcaggaaaaacccgaatatctcgaaatttcttttcctttcgatggcagattaattaccctggaactatacaaaaatcagatatttacaaacgattttaaagtaaccaccaacaaaggcgaaatcgtagattatacacccggagcgtattatcagggaattgtaaaaggagacaatcaatccgtggtcgcgttcagcttttttgaagatgatgtggtaggagtggcttccacaactgaactgggaaatgtaattcttggaaaagttaaaaattctacagactttgtaagctattcagattcaaaacttacaggattaaatccttttgtctgcggcgtggatgaattaacggataatcacaatcaaaaaatatctttcgatccggatgccaagaaaacaacaggaaaggtcatgacgcaaaactgcataagaatttattacgaagtttgctacacaccttacacaaataacggatctaatacaaccaccacagcgaattggttaaccgcaatccataacaatatctcaacgctttacagcaatgatgatatcaaaatcgctttaaacgaaatttacgtatggacaacggcagatccttacaccggaacaccaaatgcgaatctggcaagtttcagaaccaacaggcagacttttaacggtgatctggctcatttggtcaatcagccctctacaacaagtgttgcttacatcaattctctttgtacaacaaacagacatgcctattccggagcttcacagacttacaacaatgttcctgtctattcctggaccatcgaagcgatgactcacgaaatggggcacagtttaggttcgcctcatactcatgcatgtgcgtggaacggaaattcaacagcaatcgacggatgcggaacacaggctggttaccctgaaggaacctgtgcaacagggcccattccttcttctacagtgaaaggaaccatcatgagctactgtcacttagtttcaggagtaggaattaatttcgcaaacggtttcggtcctcaaccggctgctttgatcagaaatacagtggaatccaaaccctgtttaggaatgaattgtacaacggcatgttctacaacggtgacttcactttctgtttccaacattacacagatttcagcaaacgcaacatttaccgatgccacatctgcttcatggaaatacagactgacgaaatatgacggaacggttgtttccagcggaacgacttccacacaatccttaagcatggcaaatcttcagtccgcaacctattatcttttatcagtaggaacagactgttctgcgggttaccagagaacgcagatgtttttaacagatggagactggtgcgacggagctcaatttacagatacaggaggaaccacttcgaactatggagacagccagactatcgtgaaaactttctacccaagttcaggagctttaacgatgaattttacagaattcggtcttgagcaggattatgattttatgtatatttataacggtccttctacaagttctcctttgtttgcgaatggaaatggtttaacgggaactgctttacccggaacatttacgtctacccatccttccggtgcaattacggtaagattcgtgtctgatcctgcagtgaatgacattggctggaaagcaaacttctcctgtgcggttttggcggtggaagatgttaatacgaaagacaatactgtcaatatttatcctaatccggcaagaaacatcattacaatttcttcaaaagatgctttaaaatcattcaagatttatgatgaagcaggaagattaataaaatctgaatcttcattaaaaggtaataaacatgacgtgactatttcttccatgcagacaggaaactatgtggtaacggtagaaacagaaaaacagaaaattaccaaaaagctgattaagcagtaattttaagcttcttcattctttaataataaactgcggacagacagtttttaaatataatgtaaaaaagcctgattttttcaggctttttttgtatatttatagtaataggaatcctgattttagatttaattaaaatttaagaatattttgctgttaaaatttgttagaattcggcgcgagatttgcttatattcacaagaatagtattaaatttgcaaaaaaatttatttaaataaatgacaaacccattattttacgcaaaaattcttttgttcggagaatacggaatcatagaagattcccaaggtttgacattaccttatagcttctataaaggtaccctcaagttctcttcactggattccgaatttgaaaaaaaatccaataatcatcttaaaaaatacgcagattatctgcagaatttagcacttcctgaaacttttgagcttaatgtttcaaagtttaaagaagaaatttctgaaggattatttttcgacagcaatatacctcaaggatatggagtaggaagttccggtgctttggttgccgcaattttcgaaagatattctgtttccaagcatgagcctgaaaatatttcaaaagatgaactgaaaagtcttcgaacagtttttggcttaatggaaagctatttccacggaaaaagctcaggaatcgatccactgatctgctatatgaatcttcctattcttatcgaaagcaaagaaagtgtagataaagttgccattccggaaagcgaagccggaaaaggggcaatatttttaatcgactccggaatgactggcgaaacaggaccgatggttcagattttctttgaaaaaatgaagaccgaaggtttcagaaaaaccctgaaagaagaatttatccgttacaacaatgcttgtatcgatgcattccttaaaaaagacatgaacccgtttttcagaaatctgaaaaagctttctcactgggcgtatgaacattttcgtcccatgattcccgaaagtttatnnnnnnnnnnnnnnnnnnnnnnnnnnnnnnnnnnnnnnnnnnnnnnnnnnnnnnnnnnnnnnnnnnnnnnnnnnnnnnnnnnnnnnnnnnnnnnnnnnnntgatttacagattctaaaaattgttgtgaatgaattctgaaaaagaaactttccaacagagaaattatattcaaaaatcttttttttacagattttcacaattcgtgggctttcttttgggagctcgcttttttgttgccgtcctactgatttttgccctctatgtttctacttttttcctttttaatcaggatgaaaatttcagaaaattcgtattcgattttaaagttcacgggattattttctgtacggttcttacgattcttgccggaggaatcatcaatcagttttacgatttcgaaaaagatcatgttgtaaagcctttcagaacgaggattcagagctttattaagcagaaatattttctctatgcttacctcgttttaagcgtaatttctttgggagttgcctggatgatttcacataatgtttttgcgttttttgtagtttatcagttctttatgtggttttacagccataaactcagcaggattttaatattaaacaatcttacctttgtaagccttacattgtatccttttttcggaatgatggtgtattatgaaaccttttcgaagaaagttttactcatggcggtttttctttttctgattcttttatgcattgatattgtaaaagatacgttaacaaaaagcgttgataaagcatttggatacacaacaattcccaattattttaaaagcaggaataccaaaacaattattatttctctgctcatcattaccatggcagtatccatgaagctgatcatgaaaacaggaattgcaggattcatggcgtattattttactgccggattatttattttcatcctttgtgtttaccttattttaaatcatacaagaaaaagcaatttcgttacgcttaatattctcagaatttgggtttttattgggataatcgcaatgcttctcaacggactggaaggtaaattataaaaaattttctttataaaacctgatccttttcttacctttgcagaaccttaaatttataaaaagtaatgcccatttttaacgatactaaagtcgcatttgcggataaatccgatgcacagttaagaaaagcgtattggatgttcaaaatgattgagcagccttctcttacaaaaattggaacttctgttcttaatttcaccgttcataatagttttcctttcgttaccggaattgtaaaaaacactttgtttgagcagttttgcggaggtgaaacccgtgaagaaagtatgaaggtagtgaaacagctgttcagaagaggagtcggaagtattttcgattattctattgaaggtaaggaagacgaagaaacttttgatgcggtttgcaaagagatcaaagatatcgtaagattttctgtaggaaatccggcaattccgtttatcgtttttaaacctacggctttcggaagaattgatttgtacgaggctgtcggaaaaaatgtggaactcacaacaagccagaaagaagaatgggatagagtggtaaaaaggtttgacgaagtctgtaaactttgccacgaacacgacaaaaaagtaatggtggatgccgaagaaacctggatgcaggatgcagcagaccatctttgcgaagagatgatggagaaatacaatcaggaaaagccgattgtatggaataccattcagatgtacagaaccggaagactggagtatatggaagcgcatcttcagcgagcaagagaaaaaggttattttatcgggtataaaatcgttcgcggagcctacatggaaaaagaaagagcaagagccgcagaaaaaggttatgcagatcctattcagccaacaaaagatgcttccgacaaaaattacaatgcaggaattgatttcgttatgaatcatttagacaaagtttcggcatttttcggaacccacaatgaaatttcttcagagctggtcatggataaaatgaaagctaaaggactggaaaacggaaatcctcatatctatttcgggcagctttacgggatgagcgacaatattacgttctatctgtcagataaaggctataatgcggcaaaataccttccttacggacctgtaaaagacgttgtaccatatcttaccagaagagcgcaggaaaatacttctgttgcgggacaaaccggtcgtgaactggggctgattaaaaaggaactcgaaagaagaaaagcaagcagataaattttaaagataaatttctaagccttacaatattttgtgaggcttttttatgatctaaatataagttgattgaaattttgaaaaatgaacggttttaaagatcatttaaggctcaaaactttcaaattttccgttttcgtagaaaatgacgattcttttaatcttatttttctgattttcaatagcttgagcaataatttcatcattacttttttctaatcgctgagaatccgatattttctcgtgagctttactttgatccgatataaacgattcctgacgattcatttttggcggctctatttctgtttcttcactgccaaaactttcatcattatttaccatcgtaaaaagatcggggagagaagttgttcttggtttctcttcttcatagctttcttctttcagttcaggaatgttcgagtcgggaagctcagatttcagcatttcaccttcacccgtaatcagccagtcccaaagaatttcaggaaagcgggattttattttaatgataaactcaagcgacggcttatttcttccggacgttatgtgcgaaatagaagatcgctgtacttcaatttcatctgcaaactccgaagaagaaagattagaatattcgataacttttgaaattctctcgtttagactcataaaaccattcttaaaacgtgttacaaatgtaaataaataaatttacaaatgcaaatcaaagaaataaacaaatgtaaattaaagcaaaatacatttgtaaacttagcaaacatctaaaaatcagcattataatcaatagataaaaaaacaattctgaattttacaaaagtttatccacagttaaatcattaaaatcaataaaattttgctgaaaacgtcgataacttattgataagttatgttcatataaacaccattattgatgtaataaacataattttgttgcggttcaatacactgtattatcaaatacagataatgtacttaaaataacagataaacgctttataatagggtaaaatgaattttttacttttgtaaaatacagctttcaaacgcatttggactgggttttgtattattttaatctaaaatatggttattgatctttttaagatgtaccagattaaatttctgaaattagaaacagaaataatttagtaggagactgtatttttcgatgatttacatttgtatacagtgttttattcaaagttttcaacaattgttttgtttaacaaatttcctcatatttatttaaaacaaggacttttactacttaaagtaatattcaaatactcatttaattaaactttataaattactgaaattgagttatttaaaatataaacattaaattattatcaatccacaattttatcaacagacattttgtcacagctaattgtttaactatttcacaaatgtaaaatttaatttttccataaaaaaggcttaaatttgactattgtaaactatttatatgaacttcgaacagatctatctacaaaatccaaatttcccaaatcgctatatttccccagaaaaattattttcttacctacagacgaatctcagtgatcatataaaacagatcggaacgtcttatttagaaaaacctatttataagttaacagtcggaacaggaaatattaatattcttgcctggtcacaaatgcacggcaatgaatccaacgcaacgcacgcgatgctcgatttgctagtgtctttagataaagctcaggagttgaaagaagaattgttcagtaaaattcagcttgattttatttttatgctaaatcccgacggatccgaaaaatggacaagattaaatgcagccgatatcgatctgaacagggacttccataatgaagccagtaaagagatcaaattcttaaaaaatacggtggcttcaaaaaaatatgactatgcgctgaatcttcatgagcagagaacaatttttacaacagacggaattcatccggcaaccttgtcttttttggctccctcagaaaatgtagaaagaaccgtaaccgaaaaccggaaaaaatgcatggcggtaattgcagaagtttatcagcatctgaaagaattaatcccgaatcagatcggaagatattctgatgaattttatcctacttccacaggcgataattttataaaagcaggaatgcctacgattttatttgaaggcggacattttgtagacgactacaccagaaagggaacccgaaaatattacacggttgctttatattatgcattaaaagccatttcagaattaaattccgaaaccacaggctgggaaacctatctcgaaattccggaaaatagggaaacacactatgatgtcatttacagaaatgtaaagctgaatacagaccatgaatgtattttagacgtagcggttcagtaccgtgaaataaaagaagaaggaaaagatgaaatctcttttattccttttgtcatggaagtgggagacgtgaagaagaaaaaaggctggctcgaaatcgactgtaccgggaagaaatttgtctcagaaacaaaatatccaaagctggatgcagaagtgaattttacattagaagactgaaaataaaaaaagcggaaccgtaatgattccgcttttgttttatataaatagactgttcattcagaaaggaagtctgtacaattacagatcctttatttcattaaaacagaaattagtttacgactttaattccgttggctacaaatctgatctcttctttcggagttttaatcgcatcgatttcagactgaggctttttagcatcttctgcataatgtttctgctcgtctacagaagttatttttctttccgcagttccgtccagaacaacagttttaccttttaaagcagtaggaacaaagaatgcataatccttcatttttacaaaaaactgagagttatcttctgtctggatcgttaaccaacatccttttttatcgcaaacgtctgttacttttccttttacggcaacgttttctacttttttatcttttttaagctttttgctcagcttatctacggagattgctttagattccacatttgaagcaactccgccaccgtaaacatcgcctacaagagcatttcctgcaggaggtccgaatttttttgtttcctgtgcaaaagctaaagacgaagcactcacggctacagcaaataatatcgctttgaatttcatttgaattatttttctcaaaagtaataataaaattctgaacggcaaacattaaaaatttgataaaaaacaggtttaatctttcggaatttgaatgcattttcttaagactagctttgttatgtatttttaacgcggggttcgcaaagataataggattagccttgaaaaaattccgttcgtaagggtgcttcgacaggctcagcataaactattcacttaaaaagtgataacagaattatattttgaaaaatttttaattcattagacaatcatcaaaaaaattgaaatgatcattgttatttttaataaaaaccttgtgagcattgcgttaaattattacaataaaatttattttaacgcaaggttcacaaagaaagtgaggataaactttgaaaaaattccgttcgcaaagacgtttcactcagcgaatgatagcagaattttatattgaaaataatattggcctcgattttataaactatcggcacgcaaaaaattgaaaaactcttttatgcatttttatcattcgctgagtgaaacgccattgcgaacgaaaaataatcaatgttgtttttaataaaaaccttgtggtcattgcgttaaattattacaatgaaaatttgttttaatgcaaggctcacaaagaaagtgatgataaactttgaaaaaattccgttcgcaagggtacttcggcaggctcagtataaactattcacttagctaatgatagcagaattatatttaataggcgaatattaaataaaacagaaaataatcctataaatatttatatttggaatctacaatcaattatgcagaaaaaactaaaactttgggatgccattatgctggtaatgggatccatgatcggaagcggaatttttattgttgccgcagacatgatgcggaatcttggctcaggattctgggtaatcgtggtttggattattacgggagtcatgactgtcgcagcagccatcagttacggagaactttcggcgatgtttccaaaagcaggaggacaatacacctatcttaaagaaattttcggaagaaaaatgggctttttgtatggatggggattgtttacggtcattcagaccggaacaattgctgccgttgccatggctttcgggaaatttacagcctatctcgttcccactttaaatgatgcagctccgatttttcagagtggcgaatttaaaattacatggatccagattttagcaatagcaaccatccttttattaacccagcttaatacgagaggggttgaaagcggaaaattattacagaatatctttacaggatccaaaatcatagcgttactgggacttattgctacaggatttattctggtggatatttcgcatttagcggataatttcagttttgggtatgatgctttcagcaaccttaaaaaagacatttcaggaaattttctgaaagaaggctgggaacccattggcggaatgactttactgggcggaattgctgccgcaatggtaggctccgttttcagttcggtagcgtgggaaagtgtaaccttcgtttccggagaaattaaaaatccaaagaagaatgttgtaaaatctatgatctacggaacaactgcggtcatgattttatatatcgccgtcaattacgtttacctgaacgctttagacagagattccattgcttttgcggaaaacgacagggtagcggtggctgcttcnnnnnnnnnnnnnnnnnnnnnnnnnnnnnnnnnnnnnnnnnnnnnnnnnnnnnnnnnnnnnnnnnnnnnnnnnnnnnnnnnnnnnnnnnnnnnnnnnnnnatgtttttcagacaggcagagcagaacaacaaaaacaatgtgcccgcaaatgcactctggatgcagggaatctgggcttccattttatgtctgagcggacagtacggaaatttactggatatgatctctttcgtcattgttttattttacatgattactgttttcggtgttatttacctgagaataaaacagccggatctggaaagaccttacaaaacatggctgtatccggtgactccgattatttatttattgatcggaacaggcttctgcatcttattgctcatctacaaacagcagtatacatggcccggttttctcatggttttactcggacttcccgtgtattatctcattaatatgaataaaaaaactgaaaaataaattgaaaagctgttcatcaatctgagcagcttttattttttgtcaaccctaaagtcaaaaaattcccctcttttggaggggtggcaaaaatttaattaaatttttgacggggtggttttaaagttcgaataattcaaaaagtattcaaaccaaagaacttcttccttctactatatccgtcttgccaaaaagaaataatcatataaagctgttctcaaagtcgggcagctttttttggagctttttccagctttccattacaatctttttttcaaaaaggattttcattgcaatctgggctaggatttttctgtataatttcaattttgtctattacatcaatcaacaacagaaaaaattaaatcagaagtcccgaaagattcccctcctttggaggggtggcaaaaattttattaaaatttttgacggggtggtttagaaaaaccaaatcatttaaaaacattcaaaatcacagaacttctccgttgattacaaacaaccctgttttaaatctccggagttctccggaagtctcccgcagcttgcaggaaaccacagagtttctccgttgattacaaacaactctgttttaaacctccggagttctccggaagtctcccgcagtttgcaggaaaccacagaacttctccgttgattacaaacaaccctgttttaaacctccggacctctccggaagtatcccacagtttgcagtaaaccacagaacttctccgttggttacaaacaactctgttttaaacctccggaattttccggaagtatctagcaatttatttgaaaccatcgtacatgaatattgtagacaactgatccttaaattctaaggctctaaaaattcccctcttcggaggggtggcaaaaatttcaacgaaatttttgacggggtggtttaaaatcaaaaatctgtttaaactttagagttttaggattattcacaataaaattttactaattcatgtaatttcaagtaaatgctgaattaaaaaagaaaaatttaaacaacaatcaatagtattatctcctttttttccttaaaaatgattaatttggtagtatctttcaaagaattaagttctatgaagtaaaaaattaagaaggagaaatcatggacacaccaaattacagaatgccttttgttccgtcgaccttaatgacggaaggaggaagcatagaaacctgcgatatgggagaaagcatagcgcacaacattatgctgctcatcaccaccaaaaaaggcgaaaacagatacgatgaaaattacggaaacgacgtctggaaccttgaattcgataacggaattacaagcgcagtctgggaagccgttttcattaaaagcctcaaaaggcagattcaggaatacgaacccagaatcgttcagccgcaaattgatgcacacatccagatcgtagaacacagctacgacacaaaagaacataccgaaatcaaaaaaaaggtaaaaatcgccatcaatgccaaaatggagcattccggagaacgtttcagcttttctacagagcttttcctgagtccgatgtcgattgattaaattctataaccaccatcaaatcctatgaatttagaacagaatatttattccaaagaatccgtaaaagcaaggatgcttcagaatgccacaaaagtatggggtctgaaaagtcctcagtctcttgatccgttcgttaaattattaattgacgcattcagcacggaagttttcaaagcgaacaacgaaatacagaccgttaacgccagaattttagaaaaactggcaaaattattaacgccttctatttatacacatcctattccttctcatgcgattgcgtttacacaaccttatgaaccgtcggaaattttactggaacataccgagtttttctttaaaaaacagatgacctccaccataaaatcagaatcggataagcagatcaatattccttttacgccaatcggaaatatcagaatcaacaaaatacagaccgccatcatgtttgtaggaaacacctgctacggaatcgatgaccggctgaataaaattcccattgcaagatttcagggaagaccggaagattaccgtaaagtgacgatcggaattgatgtttcaaaatattcaaacgaaacttttcctaaaaatgtgagcatttactgctcaaatcctgctttcgaacatcttgattttacctataaactattgccttacattacggtttcgtccaacggaaatccgttatttgtaaaagaaggtttaacttattataaaaacaatcaggcagaaggatatgagcagatgttccgcgaacagtctattcagaataaaattattgaagacattaaaagtgtgtatcatcataaattcattgagatttccggactttcaacctcattattttcagaaccgggtcagcttcctgaaaatctcagctatgtagattataaagaagaaattacaaaatacatcgacggaaaacggtatctgtggcttactttcgaatttccgccgcaattttccgctgaaattctggataatttttcttttgttttgaatgctttcccgatctacaaccgcggctggaaaaaaacggaatacagcttagatatcatgggaaacaatattcctctcgtaacggatgaaggcgaacattttctgtatgtagatgaggttcaggacggtgacggaagaaaatacaccgaaattcctttcaccccgaatgacgatctccgaaaaggattatacacggtaagaaagggcggaatggagcgttttacgaacagaaatgccgttgatatgattgccaatgttcttgaactgacgcgagacgaaattgcagccttctctttactgaaccgtgataatgtgaaaggtgttcttagcgaaatgtccgacaaaatgaaatccatggttcagaaagtaaacaatgccaagcggaacattaaacaggagctgaactatgtaattatggaaccggttgataaaacagatcacacctatgcttcattctggatcacgcattctacattagccaatcatatgcgtcccggaacggaactttccaatcagttgaaatcacagacgctggttcttttaacggaaacgatcggcggagcggaagagcagaagggaaccgacagtattcaggcttataaatatgctttaaccaccagagacaagatcatttctctggaagacgttaaaaactattgccgtatggttctgaaagacgagctgaaagacgtaaaggtaacccgcggaaccatgatcagcaataaaccgaaagaaggtttcatccgaacggttgaggtagagatcattccgcagaattattctttctatggaagagcttattgggaaaatatggcgaatgttttaagaaaccagattatttccaaagccatcgacggaattgaatatctggtaaaagtaacgaatgaagattcggatttttagtgattgtttaggatattctcaataaaaatggatgaattctcagacgatcttaggatgacttagcgaaatcttcagcatatttatttgaaggaatataaaagcagttagtattagaatcctttcatcctgagcttgccgaaggatctttagctaaataacctcagttcgggataagaaataaatttaaataattgatttataatgttgtattattttatcgcaaagaaaaacaaaagatttttttcacttattgaaagttggtaagctaaacaaaggcacttcgtttatttaaaaaagacaaaaatggtattactttgatcaattttacgcctttgtatatcttaaaagctgaactcttgataattgaatcgctttgtttaaccttgcgtttaaaaagacttatcccgaactcaggttaaataataaaaatttcgggcaaaccaaaggtttgcccgaaactcattaaaaaaactactgtttaaaataactgatccataagaatcacttctctgttttccaataaaggaacaatctgttcggctacaactttctgataatgttcagaatttttatggaattccactgcatcggcatttttatatccttcaaacaataccaaggtatgatcgtcagatttgctttgatgtactttatagaaaagatttccttcttcctgcgaacttttttccgctgcctgtttcagcaaatccaaaacgacatccagttttccttcttttacctgccatttggcacagatatatactgctttctgatccatttttattaaatttaaagctaaattaagcttttttcgcttccaaaagagccactattttttctccgacaccttttgcagaagccggattttgtccggtcacgatatttccgtcggcaatgctgttggcagaccatggttctgctgcatggaaaatcgcaccctgctccgttaaggcagtctgaagatcaaaagcaacatccgcttttgcataactctcttcttccgcagtgctaaatgcagcaatattcttaccattcaccagataacttccgtcgcttaattttacattcagaagcgaaacgggaccatgacaaaccgctgctacaacacggttgctttcataaaaatcggcaagtacttttttaagttccggcgcttccgccatatccaccatcggagccagacctcccggaacaaaaacggcatcgtaattagaagtatttacctcagacagtttttttgcactgtgcatatcttcccagccttttccggttaaaaattttaagttctccggatcatctgctaaatttaatccgtccagaaacggagattcacccgttaaactggcaaaatcgatctggtaacctgcattttcaaattctgcataaggatgcgctacttcaggcaggaaagttcctgttcttttattgttcggaccgatagaattcgcgttggatacaacgattaatacttttggattcatgacattcaattttgtttattaaaaatattttgtttgatctttttgaaattacctgaatttctacagcaaatgtatgccgatccaatgcttccttcgaaggactgaagtcacaaaaaaagtgtgatccaaatcacacttctgcattttcttctattggctttatgttttattggtagctttttcccgctttccgttgcaattcctcattgcgcggctccgcttcgctccgccgctccattgcgggattttctctacaatcggggctatggcggaagttattcctttcaatatctgaaacaatatgcataaagtctgtttttaatctagtctttaatttattgtgttttttgtgtaaaaaattagtggcatttgtgtttaaaaagattcttaatttgtcttttatttcgtattcgcgatgtcactctgagcctgtcgaagagtctcttattatctttattgctaagatcctttcaggatgacaaaaatgctggaaatgcatttcattaagattttctgaataaaaaatttaaaaactacttattggtattagaatacagtctgcttaaagtttccctgcttacgccgagatattctgcgacatattttttaggaacttccgaaatcagatcaggatataatcttacaaattcttcgtaacgctgttgcggtgttcccgacaaaagcatcataattctctgttgaagcgcaatataaccgttcgttaatttaatcctgaagaaatgatccatcttgtgaagatctgctgcgagtttatttcttccttcaagggtaagacttaccacttcaccttctttcaggcattcgataaacattttggaattttgctgtttaaaaaatcctatataatcggacatccaccagtcttttttggcaaactgcagaatgtgttctttgccgttttcatcaatataaaacaccttatagattccgtcaagaacaagaaattcgtatttcacttcgtctccgtcatgaatcaggaactgatttttacggacttttcttaaagtgaaaaaagttttaacgtattcaaactcttcgtctgtaagcggtgtaatggcttcgatatgttctcgcagtcggttcatgataatgctttatccggtgtaaaagtaattaaaattctgaagaatctgcttgaatttccaatacagaaactgcaagtcagtttaaacttttatttaaccacaaaagccacaaaagatctactaaattttttatttaaagctgatcattatcatgaaaaagctcaccatagtttttaaaaatccttgatttttattcttttgagcgatttgattattacagaaattcgctttaacactatcttttgtcccttttgcggttaattctgaaattaatttaaacaagttttgctttaaaaagactgatctttcactgtgaaaaattgcaataagtaatcagagattcatgaaaagcaaattttgtgtggtacagttgccataataattttctaaaaccattaaaaaaacaaatggcttccgaataatttcgcatcatttttgtaaggataaactaacactttttaacgctgaaaattgccaaaatttccgtaattttgcacatcgtgattttcaggtaaaatcaccccaaattatgagtaaatcaacagaatatatagaagtttacggcgcacgtgaacataatcttaaaaacatcaatgtaaaaattccacgcaacgaactggtcgtgattacaggactttcgggaagcggaaaatcatccttggcttttgatacgatttttgcggaaggacagcgccgatatatcgaaacgttttctgcgtacgcaagacagtttttgggaggtctggaacgtcccgatgtcgataaaattgaaggattgtctcctgtaattgccatcgaacagaaaaccaccaacaaaaacccgcgttctacggtaggaaccgtgacggaactatacgatttccttcgtcttttgtttgccagagtttccgatgcctattctcagacgacaggaaaaaaactggtaagctataccgaagaacaaatcttagaaaccatcaaagaaaattacaaaggcgagaaaatcatgctgatggcgcctgttgtaagatccagaaaaggacattaccacgaactttttgtgcagatggcaaaaaaaggatacggacaggcaagaattgacggtgaactgcaggacattgaatatgatttaaaactcgaccgttataaaacccacgatatcgacatcgtcatcgaccgctggattatcggggaatctgcttccgaagcgagaatggaaaaatctctgcgcacggcgatggaaatgggagagggactgatcggaattcagaaactgggaacgaaggatattgaatatttttctaaaaatttaatggatgccgaaaccggtcattcactggctttgccggaaccgaatactttttctttcaactctccgaaaggaagctgcccgagctgtaaaggtttgggaaccatcaagaaaatcaataccgattattttgttgaaaaccctaaattatccatcaatcagggaggtttactgccattggaagatttaaagtctaataaatgggtgctttctcagattaaaaatatcttggaaattttcggattgggaatggcaactccgattcaggatattccggaagaagcgttagactatatttataacggctgtcataaagaattcaacaaagatttaaaatacgccggaattacgaagaaaatcaagatcagctttgatggtttaattcctttcatggaagaaattatcgaagaaagggaatcttatgaagcgattttgctggaaagacatttcactacggaagaaacctgtccggaatgtaagggaacccgtcttcagccttcgagtttaagctttaaaatcgacggaaaaaatattgcggaagttaatgctttaagtttaattgatttaaaggactggcttgctgatgttaaggataaattttccgagaaaaatgccatcattgcgcatgaaattttaaaggaaattgaaacaaggcttcagtttttattagacgtaggtttagattatttaagtctgagcagaagttcaaaaacactttcgggtggagaatcccagagaattcgtctggctacgcaaatcggttctcaattggtgaatgttctctatattttagatgagccttccattgggttgcatcagagagacaatgaaagattgattaattctttaaagaatcttcgggatatcggaaattctgttctggtggtagaacatgataaagacatgattctggaagccgatgaggttttggatatcggtccgagagccggaaagttcggcggggaaattctgtggcagggaaaaccgaaagatctggtaaaagcagatacgattacggcacaatatattaacggaaaaagaaaaattgaagttcctgcggaaagacgtaaaggaaacggaaaaaatatcgttttaaagggagcaagcggaaataacctgaaaaacgtaacactggatatccctctgggaaaactggttgtggtttcggggatttcaggaagcggaaaatcttcgcttatcaacggaacattgtatccgattttgaataaacatttttacagggcggttcaggaacctttgccgtacaaaaaaatcgaaggtcttgaacacatcgataaaatcgtagatgtagaccagactcccatcggaagaaccccgcgctcgaatcctgcaacctacaccggaatgtttaccgacatccgaaatctgtttgcggaattgccggaaagtaaaatccgaggttataaaccgggaagattctctttcaatgtaaaaggcggaagatgcgaaacttgtcagggaggcggtttgaaagtaattgaaatgaactttttaccggatgtgtacgttcactgtgaaacctgtaacggaaaacgttttaacagggaaactcttgaagtgcgctacaaaggaaaatcgatttccgatgtgctggatatgacgattgatgaagcagtggaatttttccagccgattccaaagatttttgcgaaggtgaaaactttgcaggatgtaggtttgggttatattacgttgggacaacaatcgacaacgctttcgggaggagaagcgcagcgtataaagttagctacagaactggcaaaaagacaaaccggaaacaccttatacattctcgacgaacccactacaggactgcattttgaagacgtaaagattttgatggatgcgattaaccagttggtggaattgggaaattctttcattatcatcgagcataatatggatgtgattaagttagccgatcatatcatcgacgttggtccggaaggcggaaaacacggcggacagatcgttgcacagggaacacccgaggaaattgtgaagtcgaagaagagtttgacggggaagtttttgaagagggaactggaataaaattatataaatatcttatggaaaaccgcaatttatgttgcggtttttttatttacttttggggaaacgaataaacatgagacttgcagctatttatataaaaaaacactttctattttctgagccacaaaccattaatctgggtgggaaatatttctatacaattactgcaagagaaagtatagataatgaatatgacgttacaagagaagaaaatccaaatttcatagagggattttggggagaaaatatttctttagtttctgcgcttgttggggaaaatggagcagggaaaacgagtgtgttgaaaataattaacaatgattttcgtgaaaactcaaaatatatactactttttgaaagtgatgatatttgttttattcaaaatcgaactggaaataaagacgagaacgataatattataaagtatagtagtgatatttttacggctaaagattttgatttgcaagaatttaaattatcaactcatgaaaccctttatttttcaaatatttatgatagaggagttaaaaagattagttcttttcttccgttaaattctaacaatttagatgaaaacataaatgaaattgaagatagaaatttaatttatcaggtacaattgatgaatagtcgtcttattgataaattaaaaaatgcgtatcaagattttccaaattttgattttttacaaataaagtctaatcctctttctaagtgggatttaagaaaaatttacattgatacaaatataggctttacaaatatcctaaagaaagtaagggaagattttgatcatgaattcgaaagattagttgatagattaaacgaaggaaattacgtgaaagaaaaaataattgaagaaatacaatttaatagatttattattgaaatatctaagacagctaacttattacatatttttagagatatgatctcaaatgctcaaaataaagatattaatcttgatactactattgaagaatattattttaaattacctcagaaaattattttagagagaagcaataataaagaaataaacggaattggatttaacgatttagccgaaaatcataaaagaagattaaagttaattatacaggatattgaatcgtcagccagtattactaatttattagatgaagtttgggaaaagtatccagtttctgaaaattcaaatttaggaaaaacacatacagaagataatttattaagaaattttgaagttaatatcctctctttacttattttaaatgatacttatggtatgacaggcttgcaagcaacctcagaacaatatgactatagcagtattagaactttaattcttagtaaagaaaataatttttcagtaatattaaatgaatatttaaaaaaatatcttgctcaaagtcatggttttatatatagtaaattagtggaaaagtttggtgaggaattattgtattctgaggaagaattaataaaatatgaaatattacagcatggtatatcttctaatggagttaaaatagaagatattcgaagaaaaatgaatcatgatttgaaaggaatttttaacataaaaaaaatgtataatttcttgaaagaaaatttaattgaagaaaatgttaaatttaattcaaaatcaacagatatactggtgaaaatgcaacaatttattaatataaatcaagaaattagaacttactttcattctttaccaaccaatgaaaaagaacttttttattacaatataggtaagaatttttcatatggtgaaaaagctcttttaaatctttttgcacagttctttgaatttaaatctcatggaaatatagagcattatgggtggaaaaatctaaatattctgcttgatgaggctgatttgggatttcatcccgaatggaaaagaaaatttatgtgtgcgataactacagtattttcaataatgttttcaaacgaaaagattcaattaattatttcaacccatgatgcattgactttatctgatattccaaacaataacgtggtatatttaagaaaagatggagataaaacaaaagtgcttaatcaaaatgaaaagcctaaaaaatcctttggagctaatattactgatttattagcagatagtttctttattaaagatggtttaattggtgattttgcgaaaaaaaagattgaagaagtgattaaatttctgaaacaagaaaaatctgaaattacttctaaagaggaagttaaaaaaataatagaattagtggacgagcctttattaaaaggtaaatttagagaaatgtattatgaactttttccaaatgattataataaagaaaaagaaatagaagaagtaaaaataaaagctattgaattaggaattataaaagaataattatgcttaagataagtccgactaaagaagctttaaaatgtcatcttaattatgttagtaaagtttttaacaaattaattagagatgaatatattattagagataaaaaacaaaagaaaatagaaaagcgatttatattatttttagataagtataaagatgagctaataaatgctgaaccaaaaagattattggaaattaattcagaatttgaaaagaaaaatttttctaagcatcaattaaagtttataaaaagtttttttcttgaaacgggttataaaaatttccccaataaaaaattcctgaaccacttaaatattgatacttgcatatattgtaacaaaaattacaccttatattttgacggaaattttgcaagagcagaattagaccactggttcccaaaagagaaatttcctcttttagcattaagtttttataatttaataccgagttgtcattcttgtaaccataagaaaggaaatggagataaaataattaaatctaaattcttaaataatgaaaatgctacggaaattgaaattcaaaactggtggaataatgaagcattgacaaaattaatacatccatattttgataaaattgatttcagcttcagttataatgttgaaagtttaaatacatacagttcaaaaattaaagttaaaagaaattcaagatccgagaatacgataaaatttaataagacaaaagaaatatacgaagtccaatctagtaaagaattaaaagatttatgcgatttaagattaaaatactccaaaaactatttagacattctttgcaacaaaacttttaaaggattaaatttatcataagaagaagcatacagaatgattttcggtattgaaattaacgcagatgattaccataaaagacctttttcaaaattcaaacatgacattattgaagaactcaaaaagagtttttaaactaaatttccctttccaatattaaattttcaaaaattttaaaattttattcaactgaaaatcagtaatttaaattctaatgttaactcaatgttaactcaatgtgaaattattgtaaattattttatatatctttggtaaagaaatagtaaataagtttaatataacatttaaaaccaaagagttatgaaaaataaaattcagatattaatcgcttcagttttcgtttgtggattcgcaacagtaatgaacatggcaaaagcacagactgcaaacaacaataccattcaggaagtgcagttgaataaaaatgatgctttcaatgaaataagaaatcttttgatggcgaattttgactttaccaatcaggattataagcagggaattgtaaactcggaagtgaaatttgatattgcagaaaacggaaaaatcgtaaatgttcattccaaaggagactgcaagaacgtaagcaaagaaatcgaaaatgttttaagcaagcttcattacagagtagacagcaaaaaattaaacgaaaatatgattgcttctacctacgttatgcctgtaagagtggatattaacaacagataacattcataaaatcttttatactgagccatacaattctgtatggctttttttattttaggtgtaaataatgaaaattttaaacgtaaagttgtaataactaagaaaaatattcgttatatatttgaatcagacaaaattaaaataatatgaaaaatttgaagaagctaagcaagacagatctgaaatcggtaaacggcggacagccaaaacaatactgcgttttctgcgaaagaatcaacaaacttgtttgcagtgaagctcagatttcacaatgtccttaacaattcagaccgctttttagaaggcggttttttttatgcttcaaaaatttttaacacaaagttcgcaaaagttattttgaaatcattggaaatatttttttgttcgcaacggtacttcggcaaactcagcataaactgttcactcagcaaatgataactgagtctattgattttttttaatcgagcaatttttgttcttcaaaagacttgtaaaatgaacgttcttaagatagcgttcctacggaacgccgaacatcttgcgataaaatttctaaacatataaatttcataaagttttctacctttttgttttaacagcttcagcaaatgccctttgagtaaatctaaactttttatttcccacttctcaaacaaacggtaaaaatttatacatttgattgtataataaaaactgttgtgaatcccattttagatgtcgttctgcgttctctctgtgtttatcttttcatggtgatcggaatccgtgttttcgggaagaatcagctttcgcagcttaacgcgggagatgttgttctgctgctcctgatttccaacgctgtccaaaacgccatggtaggacaggatacctcgcttcagggaggtttaattgcagctctggttctttttgcggctaattttaccttaaaaagattcatgttcagaagtcctgcttttaaaagttttatggaagaagatcccgttatccttattaaagatggagtagtagacgaaaaagctttaaacaaagtaaaaataacttccgatgaactggaagaagccgtgagagaacatggtgtcggaggtttcgatgaggtaagacttgcggtattagaagtggatggaaacatcagtgtggtttctgaggataacaaaagcaaacagacccattattccagaattaaaagaaaaaacaaacgaaaatatcattagccatgaactacgagcttagagaaatgcttccgaaagatgaagccagagttttagaaattttcagacagggaattgaaggtggaaaatcaaccttcgaaacaaccgttcccactgccgaagcatggaatatggattattataatgactgccgctgggttttggaaaatgaaaacaacgaagttgttggctggtgcgccctgaaacccgtaagcaaaagagaaagttataaaggtgttgccgaagtaagtgtgtatttcgataatgattaccaaggaaaaggattaggctctgttttactaaaaaagatgattctcgacagcgaagatcacggtttctggacattgcaggtgaatatatttccggaaaacgaaggcgctttgaaagcacatcagaataatggcttccggattgtaggaacaagaaggaaaatgggaaagcttaatggtgagtggaaagatgttattatgcttgaaagaagaagtgagaaagtattttaacataaaaaatactaaagtttcttaaatattcacataaaagtaataataattaattattggcatttggattgtaatttttcatatcgtaatttgaaaaatatatatttatgaagatgctgactaaaattttgggaatattcctaattgttttttcctttgccctgtacaatgctgctcctttacagagaggtcatggtcacggaagaggacatggttatggacacggtccaaaaaaacattattatcacggaccaaaaagaacttactacagaacggtagtatatcacaaaccaccgagacgttattataaaaaacattattacagacctgcaagaagggtatattatgctccaagaccgcaaagagtatatccggcaagacctgtagttattgttaatttataaacagaatataagcattgaaaaatttcagtgctttttttattttacagatgttaagctttggcaaatcgtccattctcttaccatattttatttttgaaagcaaatctattaaaaaagagttttaataatatacataaaaaaggctgtaacgataaagatacagccttttttattaaatctcaatctcaaccttaatctttacaacctcgatttcttaggattcagaaaagtattgaaaatcataacttcctgtccgaattttgcttcaattctttcggcaatattttccatttcgcttttgatgaaatcttctctcagctcgtcattatcaaaaataagaaggagattataatttttgccttcttcaatataatcgctgtgcacttcagataggatatattggttaacgtccatcagattttccgtcattaaaaccaaagtttcatccatgtaattttcccaggcttcaagattattttttgtgcagtggaacgttatgcttaatatgctcatattttatgaatttttaagattctgtagataaattttaccgcaaaaatcggcaaatttttcgtaaattagcccgttaataaaaatacaaaaaaaataattttcagacgtatagctaagggtctgactatcattataataaaattgtttatgcaaaaagaaggagaaagactgattcctatcaacattgttgatgaaatgaagtcatcttatatcgattattcgatgtcggttatcgtttccagagcgttgccggatgtaagagatggcttgaaacccgttcatagaagagtactttacggtatgtatggattaggggttttttctaatcgaaagtatttaaaatctgcgagaattgttggagacgttttaggtaaatatcacccgcacggagactcctctgtatacgatgcaatggtaagaatggctcaggactggagcttgcgttatccgcaggtagacggacagggtaacttcggttccatggacggagatccgcctgcagcaatgcgttacaccgaggcaagactgaaaaaaatctccgatgaggttctttcggatctggataaggaaacggtagattttcagaataacttcgacgacagtttacaggaaccgacagttttaccttcaaaaattccgaatcttttagttaacggaacttccggtatcgcggtagggatggcaaccaatatggctccgcacaatttgtctgagtctgtagatgcaatctgtgcttatattgacaacagagaaattacgatcgatgaactgatgcagcacatcatagctccggattttcctacaggtggaattatctatgggtacgacggggtgagagatgcgttccttacaggtcgtggcagagtagttctgagagcaaaagtagcttttgaagaaatcggaaacagaaatgcaattattgtaaacgaagttccttatcaggtaaacaaagcggagatgattgcaagaactgcggaactggtaaaagaagaaaaaattccgggaatttacgaaatcagagacgaatcggacagaagaggacttcgtattgtttatgaacttaaaaatgatgcgatcccgaatgttgtcctgaacttactttataaatatacagcacttcagacctctttcagtgtaaacaatattgcattggttcacggaagacccgagcagcttaacttaaaagacatcattcatcatttcgtagagcacagacatgaagtaatcgtaagaagaactcagtttgagcttagaaaagctaaagaaagagctcatattcttgaaggtttcatgaaggtgatcggttctcaggattctttagataaagcgatttcaatcatccgtcactctgctaatccgcaggctgcgaaagaaggattgatcgaagctttcgagctttctgaaattcaggctcaggcaattcttgatttacgtcttgcccgtttaacaggaatggagcttgacaagatccgtgatgagtatgatgcaattatgaaagaaattgcagatctggaagatattctggcaaacgaaccaagaagattccagatcatcaaggatgaattaactgaagtaaaagaaaaatacggcgacgaaagaagaaccgaaatcgattattcaggaggagaaatgtctatcgaagatattattccgaacgaatctgtggttcttaccatttcccacgcaggatacattaagagaacttcattatcagaatacaaaatccagagcagaggcggtgtaggaaataaagccgcaaccacaagagatgcagattttcttgaatatattgtttcggcaaccaaccaccaatatatgctcttctttaccgaaaaaggaagatgttactggttaagagtatttgaaattccggaaggctccaaaacagcaaaaggaagagcggtacagaacttaattaacattgaaccggacgataaaatcaaagcttacatcagaaccaataacttaaaagattctgaatatgtaaaccagatgagcgttgtgatggtaacgaaaaacggaaccattaagaaaacttcgctggaagcatattcaagacctagagtaaacggggtgaatgctattgagatcagagacaatgaccagttgttaggcgcttatttaacgaacggtacttcacagatcatgattgctacgaaaaacggtaaatgtatccgtttccctgaagaaaaagtaagagaagtaggaagaggatctatcggagttcgtggtatcgccatggaagaagacgatgaagcaatcggtatgattgttgtaaatgatgtggagaaagaaacagtgcttgtggtatctgaaaaaggatacggaaaaagaactgcggtagaagattacagaattaccaacagaggaggaaaaggagttatcacgctgaatatcactgaaaagacaggaaatcttattgccattcagaatgtaacagatgaagacggattgatgatcattaacaaatccggtgttgccatcagaatgggaatggatgaaatgagagtgatgggtagaaatacacagggtgtaagactgatcaatcttaaaaagaatgacgaaattgctgcgattgcaaaagtagaaatggataaagaagtagaagaagaatctgaagaaaatgaggaaggggttgtaggaacgctatttgataaccaggaagacaatacagatgctcctcaagctgaaaatgaaaatccggcagaggaaactgagaattctgattcggaagaataattaatattgtacaattaatataaaatagtgattatgaaaaagctaattttagggatagctatcgtggcatctgcttttgtttttggacaaaaagaagatactaacgctaaacttcaggaagctaataaagttgcaatggatgcttataatgcaaaaaactatgcagcggcagcgcctaagtttatggaagtttacaacttgttgaaagctaacggacaggacaataaagtatatatgtattactcaggattgaattatgcgttagcaaacgatattcctcaggctacaaaaatatatacagatttgatcagttccggttatacaggtgttgaaacaacttatacggcaaaagacaacaaaacaggtcaggttgccagttatgataaaaatacctgggaattgttaaagaaaacatcatcaaaagactattcagattttaaaacggaacagtctccaagtgttgagcaggatttatatgaaactttagcgactttattaatcaatgcaaagaaaaacgatgaagctttagcattaattgaaaaaggactggctaaatttccgaacagctcaaaactgaaagaatatcagggaagtgcactgtatgcatccggaaatacagaaaaattcatggcaaatttaaaggaacaattggctaaaaaccctaatgatgcgaccaactggtacaatttaggagttcttcaggcaaaagatcctgcaatgtcaacagaagccatcgcatctttccagaaagcaattgaattgaagccggatttcgctaatgcttatcagaatttagtatacacagtaatcggagacgatgaaaaagctgtatccgaaatcaatgcattaagaaaaacaaaaccggacgatgctacaaaattaattgaagcaagaaaagaaaggtttacaaaagcaattccttacggggaaaaatggcttcaggcattaccaaacgatattacagctgttcaggtaatgaaggatgtgtataatacatctaaaaatacagccaagtataatgaaatgaaagctaaagaagctgaattggcagcaaaacaacctgcaaaataattttagatactttcatttaaatataaaccggaacatttttgtttcggttttttttattcagtagaaacaaatattttcttgctttagtaatattctgtcattctgaaagaagcgaagcgtattgaagaatctgtttctattgcccaaattcattcttcaaaaagaaattcgggttttgtattgaaataaagttagttttcaaatattcagcattattcaattttttcagccaaaaagtatataatattaaccttagttcggataagaaataaatttaaatagtcgatttatagtgttgtattgttttatcgcaaagaaaaacaaaagattttttacttattgaaagttggtaagctaaacaaaagcacttcgtttatttaaaaaagacaaaaatagtattacttagataagttttacgcctttgtatatcttaaaagcttaattcctgataattgaatctctttgtttaaccttgcgtttaataagacttatcccgaactcaggttaaaataatttcaagcatcaaaaacagctaatattagaactaaaattccaacgattatcatcaaaaatcaatgttaaaattctctgcaattccgtatctttgagaaaaatttttacaaaaatgattgagtggaaaaccgccaaagaatacgaagatattacgtacaaaaaatgtaatggggtagcaagaattgctttcaacagaccggaagttcgtaacgctttcagaccaaaaacaacttcagaattatacgatgctttttacgacgcttatgaagacccgaaaatcggtgttgtgctgctttcaggagaaggaccaagtcctaaagacggaggctgggcattttgcagtggtggagatcagaaagcaagaggacatcaagggtatgtaggagaagacggaagacaccgtttaaatattcttgaagttcagcgtctcatccgctttatgccaaaagttgtgattgcagtggttccgggttgggctgttggtggaggacactctcttcatgtggtttgtgatcttactttagcaagtaaagaacatgcaattttcaaacaaaccgatgccgatgttaccagtttcgacggtggttacggatctgcttaccttgcaaaaatggtaggacagaaaaaagcccgtgaaattttctttttaggcagaaattattcagctcaggaagctttcgaaatgggaatggtaaataaagtggttcctcatgcagaactggaagatacagcctatgaatgggcacaggaaattcttgcaaaatctccgacttccatcagaatgctgaaatttgccatgaatcttacagacgacggaatggttggacagcaggttttcgcaggtgaagcaacgcgtttagcatacatgacagaggaagcaaaagaaggaagaaatgcattcctcgaaaaaagaaaaccgaatttcggagacgatcaatggatatcttaaaaatataaatgataattgatagataatgattgactatcatttatcaattatcgcttatcaattataaattatgactgattggataaaagccgcaaggcttagaacgttgccgttgtcgctcagcggaattattatgggagctttcattgcaaaatggaggctttatggtgaaggtggaatctgggactggagaatttttgctttggcattagtcgtgactttattataccagattctttctaattacgccaatgattacggagacggaattaaaggaaccgatgccaaaagagcgacagaagcagaagcaagagcagtagcctcaggaaaaattacggcaaaacagatgagaaatgcagttattcttttctccgttttatcatttatagcaacagtagcccttttatatgtggcgtttattcccgattatatgaatgaattttacatattcatcggtttgggaatcttgagcattttagccgcaattggttatacggtgggtaaaaaaccttacggatacatgggattgggagatatttttgtatttattttctttggtctggtttctgtctgcggaagttatttcctgtttaccaaatcgttcagttgggatatgttattgcccggaaccgcaatcggaatgatgagcatggctgttctgaatctgaacaatatgagagatattgaaagcgataaattatcagggaaaaacagttttgcactgagaatcggcttcaaaaatgcaatgatttatgaaatgattcttttgcagcttcctctgatcttaattttgttgttcttaggagtcaatggttttttccagacgcagaattacaaagtgtttattgtgatgatcttaatgattcctttaatgaaaatcagaagaaagattatggccgtaaaaaatccgagagaactggatcctttcctgaaacaggtaggaatcatgacctttatgattgcggctcttaccgcagcaggacttaatctgtttggttaaaataataatatgaccgctttaaaaattacatcctgtttatccgtaacagcagcattcattataatttacagtttaattaatgaaatgcaggatggggcgtctttctcagagattgcctttctgccatttttaattctgattgctgttttggcaaacgcggttatggcggtgctttttttagcaggaaaaataaagctgataaaggaattcctcattatccagatttttatcttgatgcttaccggcttcataatatttcagattttatttaattcaacaatttcagactaaatcaaaatataatttttaaataaattaaaatgaaaatacaatacttaggacaaaattgctttttgttcacctacaaagacaaaacaatattatcagatccattctacaactataaaaaagcagaatctggattcgatatttctgcacagaaaatcgattatattttattgactcacgctcatggagatcacattgcggatgtagaggaagttttacagcatcatcctgaagcaacacttattgcagttcccgaaatctgcggatactttaaaaatgcaaaaaatacagacgatgtcaacttaggaggatcagcaaaaatcgatgatcttaaaatttctatggttccggctcatcatacaagttcgtttccggacggaagttatggaggcgttcctgtaggctatattttaaggcttcctgaaggtaaaaacctgtatatggcaggagataccggagtaatggcggatatggagctgtttccaaggttatacggtaatttagacctttccatccttccgatcggaagtcactacacaatgtgcccgagaaaggcagcatttgcagcagccgaattattaaaaactccaaaagtaatcggatgtcattttgatactttccctgctattgaaattaatcatgaaagtgcacagaagcattttgaagataaaaatgtagaacttgttttaccaaaactgggagagacgttcgaattttaaataaatgttgggaggtaatttgaaaacagaaatcaaaatgttgaagtatataaaaacaaaaaaagataattatccaattacctctcttcaacttaaaccaataaaaaatggcaagctacctaaatcacaccgctacgaccgattacctttgctgcgttcccaccctggaggattctcaggagctggttgtttaggacttgccgttgcaaaggtaggaatattttgcaaaactcaaaactttattaaagaaaattaatggaaaaaattggcttgcagaggtagtttgctgaaattcagaccaataatttttcaaaaattttcaaaaaaaattagatatgacgaagagcccttccacattaggaattttactgtttggagctacgatgattgtttttttcgtggtgtattacttcttttcaggagttaattattttgatatttcattgaaagccaatgctttcgttttaccgattctgtatgcaggagccgcattctggtcggtgaaatcgtactggagcagccatagaacggtaagctttaaagaagcgtttaaaagagctttcgttcccatgtttatcggaggaattttatccattttcagcatttatgcttttctgaattttgtggatacagacgcaaaaaaactgctgaattatcagtatgtaacaagacagaaagcggaaatggataaagaatatcattctgcaagaaaagttttaaagcaccagaaagacattgatgaactggataaaaagtacaaagaaaggcttccaagcttctctccggaggcggtgaaaggaaaagatatgcttactgcaagtcatttttcaggatattttgcggcaattcttatattttacgtagttttgtcagtgtttttcggagcgtttttcagaacaaaaacaatctatcaggaagaacaaaaccaagaataattttttattaaaattaaatgaatttatctatagttattccgttactgaatgaggaagcctctctggaagagcttttttcaaggattgataacgtttgtaaatcaaacagtttatcttatgaaatctggtttgtagacgatggaagtacggatctttcgtggagcattatcgagaatctgaaagtacagcatcctcagatccacggaattaaattttctaaaaattacggaaaatctcaggcgcttcacgctgcctttgaaagaacaaacggcgaagtcatcatcaccatggatgctgatttacaggattttccggaagaaatccctgaactgtacaatatggttgttcaggataattacgacattgtttccggctggaaaaagaagcgttttgataacgtaatgacgaaaaacgtaccgtcgaaactattcaatgcggcagccagaaaagtttccggtgtttatcttcacgatttcaactgcggattaaaagcttacaaaaagcaggtcgtaaaatcaattgatgtttacggagatatgcaccgttacattccggttttggcagcaaatgcaggattcagaagaattacagaaaaagaagtacagcatcaggcgagaccttacggaacttcaaaattcggaaccgaaagatttatcagaggatttctggatttggtaacgctttggtttgtaagtcgtttcggaggaagaccgatgcatttcttcggagcggtcggaactttaatgtttatcgtaggttttctttctgcactttggctgggagtttcaaagctgattgatgtggcaagaggaatttatggtcatttaatcaccaataatccgtggttttttatcgctttaaccatgatgatcatgggaacattgctttttattgcaggatttttaggtgaaatgatcataagaaccaacagagaacataaaaattataatattgacgaagtaatttaacggaaaaaatagatgtaatcattcaatatgaataaaaagcgttgtctgaactgtggtcattcggtttccgatgagtattgtgctcattgcggacagaaatctgacacggcaagaataaccccggttttattcattaaaaatgatgttttaggctctatatggcatgtcgaagcaaggtttttgaatacgttgaaagaaattttaataaaacccggaataaccgcaaccaattacatcagcggaaaaagaataaggtattataattttatttcgctgttgcttattctttttgggtttaacgttatagcctttcatctgtatgttgatactgctaaaatagatctaaaagcagaagattctaaaaccatagattttttcacaaaatattcaaaagcaacattattgcttctgattcctattcttgcctgtaacgggtggattgtcttcaaaaaaataaagtttaatcttgcagagcattttgtaattgctactataagtttaatcgggattcttgttttttttctcacggatgatctcatcagtatcatgggaacttacaaacctctttcaggaatttctgatggtattgacagggttttggaaactgcatttattttctttcctgcattcgtttatataaatgcattcaggaaaagatactcttgggcaggattggcttggagacttcttgtattttacatattagttctttcagaagttctttttttaatgttgtttattgaaaaattcctataatttaaaatgaaaaaaatacttttaatcatcataatagcttctgcggtttcctgcggaaaagtttctccgaaaggaaatattgaaaggaaggacgtagatgtttcagaatttgtaaaccttgatctggaagggaaattccgtgttttttacgcaagaggaagcaaaaattttatagaaatcgaaacctatcctaatgtcgccgataatcttgaggtggatgtaaaagataaaaccttaacgatcaaagaaaaacgaggaacagaaggagttgatttctacaatgtaacgatttattccaaatacaatctggaaaaagtaaccgcttcggattctgtagaaatgaacatttcgagcgaaattaagaccgataattttaagcttaatttaaaaaattatgctacatttatggggtcggtaaatacaagaagagcagaagtggaaatgatgaaccgaagcagagccaattttctggggcaaactaaagatgctgtgattaaagtatctgatacagcaagtttaatcgcgccttactggaaaattgaaaacctgaatatcgattctaaaaacggaaattacgccgaagtgaatgtaaaagattcattgaaaggacatattcagaatacggctaaatttgtgtattataatgatccgattagggcttttaaaattgataaaagtacaagagtggaaaataagaaattagactaattaggaagttggaggctggatgatggaagtttagaggatttgaatttttcaatctgttaatcaatgtaatacaaatgagttttaaatttgaaaagttaattatttggcaaaaatcaatggagtttggagaaagtatttttcagcttactttgcaatttcctaaagacgaagcctttaatttaacctctcaaatcagaagagcttctgattcggttgcattaaatatttctgaagggagtattttacaatctaaagcagagttcagaaaatttttaggatattcaattcgttctttagcagaagttgtaacctgcctttataaagcaaagaatagaaattatatttcagaagaggattttaataaattatacaatgagagctataatcttatgaatcagataatagcttttagaaaccaaataaaagaataataaatgctggaaagcttatgctggaaatagacttccggcttctaacttccagcatccagctaaaaaaacatacaaatatgacaacattagaaaaagcaaaactttggttgggcgaaacatttgatgaggaaacaagaaacgctgttcaggaattaattgacagcaattcgcctgatctggaagactctttttacagagaactggagttcggaacaggaggaatgagaggaattatgggcgttggaaccaaccgtttaaataaatatactttaggtcaggcaacacagggacttgcaaattatatgttaaagcagtttcagggagaagaaattaaagtggcaattgcttatgacgtaagaaataactcaaaagaattcggaaaactggtggctgatgttttaacggcaaacggaattaaagtattgcttttcaaggatcacagaccgactccagaattgtcatttaccgtgagaaataaaaaatgtcacggaggaattgttttaacggcttcccataatccgccggaatacaacggttacaaagtatactggaacgatggggcgcagattgttccgccacacgatgaagcaatcatcaatgaagtttattctgtaaaattcgaagaaattaaattcaacggaaacgatgatttaatcgaatggatcggggaagagcaggatgatgtgtacattgatgcatgtatcgaaaattctacctatcagaatgttggaaaagaaaatttaaacatcgttttcacatcaatccacggaacaacttatacaaccgttccgaaagcattggaaaaagcaggtttcaaaaaaattgatcttgtgaaagagcaaatgatcccaagtggaaatttcccgacggtagattctccgaatccggaagaaccggccgctttggaaatggcaatggatctggcaaaaattaccaatgcagatattgtgatcggaacagatccggatggcgacagactgggaattgcggtaagaaatcttgacggtgaaattgaattgttaaatggaaaccagaccaatacgatccttacgtattatattttaaacgaatggagaaagcaggatagaatcaccggaaaagaattcatcggttctacgatcgtaacttcagatattttctttgatattgcacagagatttggtgttgactgcaaagtcggattaaccggatttaaatggatcggaaaaatgatccgtgatttcgaaggaaaagaaaaattcgtttgcggtggtgaagaaagtttcggtttcatgacgggagatttcgtacgtgataaagattcttgcggaagtattgttttagcctgcgaaattgctgcatggtgtaaagccaacggaagaacgatgtaccaatatatgatcgaaatttatcaggaactgggaatgtattacgaaggattggtaaatctggtaagaaaaggaagagacggagcggaagaaattcagaatatgatgaaaaatttccgtgaaaatccgccaaaagaattggcaggttctccggtagaagaagtgaaggattttaaagagcagaccaacttcattgtttcgaaaggagaaaaagtcgtaatgaacgacattccgaaatcgaatgtattgatttattacactcaggacggaaccaaagtctgcgtaagaccttcaggaacagaaccgaagattaaattctatatttctgtgaaagattccgttacttctgaagcagatttcagagataaattgaagtctttagaagcaaaaatagaagaagtaagaaaggatttgaaattagattaatttcattcgatcttcatgataaaaagaagtttagcggcttttattctgttgatttttattttttcctgcaaaaaagaagcaccaaagacttctgcaggaaagatggaaaaagacaccgtttcaaaagcagaaacaaaaaaggatttgtttaagcctattgatactgcctgttcttccggaaataagacggaagattatattgcagcgtttcagtggtatcagcagaaagctgaaaaagaaattgctcagaattcacctgaacagaatgataaattatacgaagattatatcaggattcgtgaaaaatatacagactgtttaaacgaaagtctgaataagatccttgaagaatatgtgaattattatgattccgaaagcaaaagttacaagtttcctgaaaatataaagaaactgattgccgaactgaagaaagctgatcttgaatttacagaagtaggagaaggatataccgaaatatattcggttccggatcattatttttctgtatttaaagataaagtaaccccggattataatacgtatatcgaacagttagcgaaagaaagcgaaggtctttattcggcggatgcaggattggtaatttcatggaaagagttaggagaaagaactgttttctgggaaaattttataaaaaaatatcctaaaagttcattgatttccagagtaaaagaaatatacaataattatttgtatgattatttattcggtatggagaatacaccaacttacgagtttttggatggaacgatatatgacgaaaacaggaaagaattcaataggatcataaagaaatatccgaattctgctgtagctaaaaaggcaaaagaattaatcagccttctggatgcaaaagttcctgaagaagaagttgtaagaaaaataaatattagaagagaatattaaataaatttaaataaaataaagtgaaagtttcaaaattagcggcgaacctgattggttctgaaattgtaaaaattggtaatgaagtaaatgatttaaaggcaaaaggagcagaaatcgcgaatcttacgattggtgatttaaattctaatatttatccgattccggcaaaattgaaggaagaaattcagaaagcttatcagaataatctgacaaattatccgcctgcaaacggacttttatctttaagaaaagaagtttccaaagatttaaaaaccagatggaatttagattattctcccaacgatattttaattacggcaggttcaagacctttgatctatgcggtatacaaaacaatcgtggacgaaggggataaagtagtgtatccgattccgtcctggaacaataatcattacgcttaccttacttctgccaatgccgtagaagtaaaaaccactccggaaaacaatttccttccgactgcggatgatctgagacctcacttagaaggagctgttttactggcactttgttcaccgttaaatcctaccggaaccatgtttacaaaagatcagcttgcagaaatctgcgaactggttttagcggaaaataagaaaagaggtgaagacgaaaagcctctatatttaatgtacgaccagatttattctaaccttacttttggggcagaacacgtagatccggtttctcttttccctgaaatgaaagaatttacggtgtatatcgacggtatttcaaaatgtcttgcggctactggagttcgtgtaggatggggatttggtccggttcatatcatggacaaaatgaaagctcttttaacgcacgttggagcttgggcgccaaaaccagaacaggaagcaacagcaaaatattacgaaaatcctgaggacgtaaatgaatttgttgaagattttaaaggtaaactggaagccagcctgaaagttcttcacggcggaattcagaatctaaaagaaaaaggtctttctgttgacagcatcgagccaatgggagcgctttatcttaccattaaattagattatataggaaaaacaaaaccggacggaacggtgattgaaaactcttctgatctcgtattctatttaatcaatgaagcaggtgttgctttggttccgttctctgctttcggagaagaaaaatcagaaccttggttcagagcttctgtaggaggtttggcaatcgacgaaattgaagtgatgatgccaaaactggaaaatgctttgaacgctttaaaataaaatattgaaaaaatataccaatctaacagtgtaacagtttaataattgttacactgttagatttttaaattattatattgatagtatgaaaattatcgcagttattcccgcacgttacgaagcaagccgttttccggcgaaactgatgcagttgcttggagataaaaccgttatcacaaccacttatcagaatgtcgtagaaacaggtctttttgatgaagtttttgtggcaacagattctgaaattatttttgatgaaatcattcagaatggtggaaaagccgtaatgaccggtcaacatgaaaccggaagcgaccgtattgccgaagcagtgcagaatatcgactgtgatatcgtgatcaatgttcagggagatgaaccttttttaaaattagaacccttacaacaattaattgaagtttttcatcaggatgacaatcaggagatttctttggcttcgttgaaaataaaactcactgaaaaagaagagattgagaatccgaataacgtaaaagtaattaccgacaacaatggttttgcactgtatttcagtcgttctgtgattccgtttcatcgtgaaatttcgtataatgttgattatttcaaacatattggggtctatgccttcagaaagcacgctttgatccagttctcaaaactggaaatgaaacctttggagatttcagaaaagatagaatgcatccgctatctcgaatatggcatgaaaatcaagatgatagaaaccaatttcgttggcgtaggaatagatacgccggaagatcttgaaaaagcgagaaaattaatttaaaaaagtgatgtaattcacattttcaaattgtttcattttcaaattttcaaattaaaaaagccttatatttgaattgataaaataaaattaatgaagaagttacttttagtattcgtcctgattatttcacagtccttttttgcgcagaccgccaaagaaattattgataaaaacattgaattatccggaggattaaccaattggaaactattaaattcagtattgctgcagggaagagttattctgggaatcaaggatgaatatcctatcaaaatttatcagcagcgtcccaatcttaccaaaaccgtcattaccattagcggaaaagatacagccattgaaggctacgacggatcaaaaggatatgctatgaattatgcgaccaacaaagttcaggaatatgcaggatatgtagcggaaagtttcgacaatgattttatagactgggagaataaaggatttgaagcgaaatatttaggcaaagaagtggtaggaaatatttactgtcataaagtggaattaacaaaaaacgttaacaaaaacatctattatttcgacacaaaaaactatatgttgctgaaagaagtaaaaaaagatgaaactttatcgtattcagattataaaaaagtcggaaatttatccatgcctttcaggatagaatcttccagtgcaaaaaaagacggagattacgtaatgctcatcaacaggattgatattaataaggtatttcctgccaatacatttaaattttaaatcagataataaaattgagttatgaaaaagttatttttaatgttcttatcagttgttgcatttttcaacagctgcgctcagaaaaaaagtgaagaatctaaagccaaaaccaaagaacttatgggaaaatcaatatacgacttcaaggttgatgccttggaagaaggaaagcagattaattttgcagattttaaaggaaagaaaatccttattgtaaatactgcttcagaatgtggattcactcctcaatatgctgatcttgaaaaagttgctgaagagtataaagacaaattggtcgtggtaggatttcctgccaacaatttcggaggtcaggaaccgggaagcaataaagaaatcggagctttctgccagaaaaattatggagtaacatttccaatggctgccaaagtttcagtaaaaggaagcgacacagctccaatcttccaatatttaacggaaaaagatttaaatggagtaaaaaatacaacgatcctttggaattttactaaatttttggtagatgaaaacggaaaactaatcgattcttttgtaagtacaacaaaaccaacggacgaagcgattacgaagtatttgaaataacatcaaaaaaatatatttttgtaaagtggattttgatccactttttttatttttaaaatttatgaaaaaactactaaccatttttattttgattttttcagttaaaacattttcacaggatttttatttttccggtaaaatgaattactgcactccggaacatgcagattctaaaaaaaactttgagaccgcttttttaggattaaaataccctcagtattatggaggaatcacggcattatttctgaaaataatagaaaaagatcctaaatactgtgatgcttattttatggctggatattttttcagattgcaggaaatgcacaaagaagcacttgctttatattatgttgcagatagcctcgctcaaaataaggctccgattttcaaacagaatttagcaatagaatttatgaaattcggaaaggtggataaggctagacaaaagtatgaggaaatgataaaatatttccccgagaatcctgaaggctattacggaattggcaatacttctattgttatgggagattatgataatgggttaaaaaatctgaagcaagccgaaaatttatacaatacttcaggaaaagttaaggatgatgttatttatatgtacggaatgttgtataccttaaaagaaaactacgatgtagctttaccgtaccttgaagacgtttacccaacatataaaaaagatgacggatatctttctttatatgctcttgcactgataaaagtaggcaaaagtaaaaatgacgaaaaacttatcaaaaaagctcaaaaaacttatgataaggttaaagataaagttatagttccggaaatcagaaaaaagttaaattcagagtttggttaatttgtataactgattcaaaatgtattcggctctatttggttaaaatatagttaaatagagtcgaaatcaaaagttaatcattgctcttttccgcgaaacaaaaaatattccccaactttatgcttgaatagccattgcttttaattttggaagaattaatcattgcttttgccagaacatctgtcggtaaaggtttctgactttctaaaagtcctaatttattggcaaatttaataatacggcttcctaaaacttctcctgttctgtcagaatcttttctttccagcattcccggtttgaaaatggttattttattgaaatgaagctgttttacagcatcttccaattctcccttcattttggaatagaaaattttagatttgggatttgctccgtaagcagaaaccaaaatgtaatcgtctacattattttctttggcagcttttgcaaattcgtactgataatcaaaatctacttttctttgtgcttccttgcttccggcagcttttagagttgttccgagacaggaaaatgcaacatcaccttttacttcacctttccattcttcaggtttttcaaaatttacaatatgcactttaagtttatcattttcaatttcaagaggttttctcacaaaaatatttacttcttcaaaatctttatcctgaagtagctgattcacaaggtcttttcctgtagcacctgttgcgccgataactaaagctttcataaagaatttgattttaattaataattgaagaatttccctactaaatttacaaaattttaataatattgaactctcaatttttaaaccaatctgcatggacgctaacgaaattctggactattgtttatcgaaaaaagaagtaaccgaaagttttccttttgataatgaaacacttgtactaaaagtaggaaccaaagtatttttattgatgggtcttgaaagacagcctctcggaatcaatgtaaaaaccgatccggaatggagcgcagaacttcgcgagcagcatcctcagattacgggcgcttatcacatgaacaaaacccattggaactctgtggttatcgacggtttaagaaaagatttaattctgaaaatgatcgatcagtcgtatgaattggtctttaaatctttgacgaaaaaagttaaagaagaaattttaaacagttaaaaattatactcttgcgttaatcttttatcatcatcaagtctttcaattaatttttcaagcccttcaaatttaatttcatcgtgaagaaaatctctgaattttacggtaatttcttcatcataaatatctccttcaaaatcaaggatataaacttccacagtaagtttttcgccatttacggtcgggttggttccaacgctcaacattcctttatactgcttatttttcacaaaaacttcaacaatataagctccttttttaggcaaaagtttaatggattccgtttcgatattggcagtaggatagcctattgttcttccgatcttttttccgtgaaccaccgttccggaaacagagtaggagtatcccaacatttcattggcttccttaatatttcctgctgaaagtgcattgcggattttcgtagaactgatgttattctcgtgaatattaatagcttccatctgttcaacttcaaaatccaattccttggaaagtttctgaagcagttcgaaattgccgcttttattttttccgaatgaatgatcatagccgataatcaggtattttacattcagtttttcaattaaaatctgtcgtacaaattcttctccggttaaattcctgaattcttcatcaaattcttttagaaataaattctcaatgttgtatttttccatcagaaatttcttttcttccaacgtattcagaagtttaagattttcatcaggattaaaaacaaatctcggatgcggccagaaagtaaggacagcgatttccagatcgttctgggaacccactttaattaattcatcaataatacttttgtgcccaagatgaaccccgtcgaacattcctaaagatagcgctaatggcttctgagaggtataatctttaaaatttttgaaaactttcaaaccggaaaaattttgactgcaaatataggaaataatgtaacaatgtatcaatataacggctgggcaatattttaatctgtaattattgttatattgctaaacgaacagttttttagacttataaaaagatatgataaaaatctgttttttaccaattgcaggtttatgaagaatcattatatttgcaccaagaaaaaatttagcaatggcaaaccaaattaaaggtaaaatttctcaaattattggtccggtaatcgacgttgtcttcagtgatgtggaagcagttccagcgatctatgatgcgttagaaattacaaaagaaaacggtgaaaaagtagttttagaggtagaacagcatattggcgaagatacagtaagatgtatcgcaatggatgctactgacggtcttaaaagagggcaggacgtaatcggatacggaaatcctattatgatgccaatcggtgaggcagtaaacggaagactattcaacgttgttggtgatgctatcgacggacttcaaaatatatctaacgaaggtggtctgccaattcacagaccagctccgaaatttgatcagctttcaacttctgcagaagttttatttactggtatcaaagtaatcgaccttatcgagccttacgcaaaaggaggtaaaattggtttgttcggtggtgcaggtgtaggtaaaaccgtattgattcaggagttgattaacaatattgcaaaaggacacggaggtctttcagtttttgccggagtaggtgaaagaacgagagaaggaaatgaccttttgagagagatgttggaatccggaatcatcaagtatggtgaagatttcatgcactctatggaaaacggaggttgggatctttctaaagtagatttagaagcaatgaaagattctaaagcagcattcgttttcggacagatgaacgagccacctggtgcaagagcgagagtagcactttccggtcttacattagctgagtactacagagacggtggagaaagcggacagggtagagacgtacttttcttcgtagacaatatcttccgttttacacaggctggttctgaggtatctgcacttttaggtcgtatgccatctgcggtaggttaccaaccgacacttgcttctgagatgggagcgatgcaggaaagaattacttcaactaaaaatggttcaattacttcagtacaggcggtttacgtacctgcggatgacttaactgacccggctcctgcaactacgtttgctcacttggatgctacaacggtactagacagaaaaattgcttcattgggtatttatcctgcggtagatccattggcttctacttcaagaatcctggctcctgaaattatcggtgaagaacattataactgtgcacagagagtaaaagaaattcttcagagatacaaagcgcttcaggatatcatcgcgattcttggtatggaagaactttctgaagaagacaaatctgttgtttaccgtgcaagaaaagttcagagattcctttctcagcctttccacgtagcagaacagtttacaggtattcctggatctttggtagacatcaaagataccatcaaaggattcaacatgatcattgatggtgaattggatcacttgccggaagctgctttcaaccttaaaggaaccattgaagaggcaatcgaagcaggacaaaaaatgttagctgataacgcttaagaaattttaaatgttgaattttagattttagattgaatttcaataatttataatttaaaatctataatctataatttcataaaaatgaatataaaaattttaacaccagaatacgtagtttttgaaggagaagtagactcagtattactgcctggaaaaaatggtgaattccacatcatgcaaaaccacgcaggaattgtttcttctttaatcggtggtaaagtaaaattatatgctaaatctatcgatgaagcttattcaaaatactttacgaaagaaaatgagaaagattcagttttttcttatcctatcaaaagcggtgttgtagaatttaatcataataaaggaattatcctttgtgaataattaaatgaaaagctaaatatattttcaagaaagtgtaacaattcgttacactttttttatttttgtatgaatttggttttatgaagggatttttaattattttattttcagttttagggttgcttttcaatgctcagacggttaaaattaaaagaggaattgtggatcttgaaggaattcatgtcgcaaaactgtcctataaaagtggaatatatacttttatggatcttaaagaaactccgatttataccatagaatttgtagataaaagtgtggttgattctgtacgcgacagttacattaagctaaaaagaatttataatcaggacaaaacgcttgatctggactatatttcgccatctgcattttctggggaagaaaaatcggcagcctacacttgtgtgaaaactctgaagattattgatgaaagaggaatcaacatcaaaaacttagatgaactttttaaaaattctcctaaaagaaaactggataccaaaacaaaagatgcttataccatccgaactaaaattgacaaattaaatataaccgtcaataatgttggtgaaattttaagtaacggaaaaccagtgggttatttcactaatttaccggcaagttttggttctgatgataccattacggacaaaacatttgttgatattgaaatttatgatgcgaacagcaaatacatcggaaaatacattacgacaaccaaacagattaaatctgcgggagggaaaacctttactctgtaccgcgaaatgtccggaagagcatcaattttaaagttccctacctacaaagccattgccgaaagaatggccattatggatcccaactttataaaaattcaggaaaaagtaattgtgggtgaagtcacaaaagacggtattcaaaagtaaaaatcatcaataggaacgggctaaagcccgtttattttaataaaattcaattggctttagccaaacttaaaaaaagcttcaaattatcttgaagctttttctattttctattcaattttttccgattagaaatttttttaagtagagtctgtttaaactttttatttaaccgtaaaagtcacaaaagatgactaaacttttatttaaagttgatcattataaatgaaaaagctcaccatagttttttaaaatctttgatttttattcttttaagcgctttgattattaatgaaattcgctttaacattgtcttttgtgcttaaatataacaggtctgaaatattttttaaaatctacaaactcaaaatcactccattctctttcaattgctgcatcggtttagaaaaccagaataattcaaaatcttcaaaattttcttcgaattgagttttcaattgttgcaaagttggcttttttaaattttcaattggataatcactaaacattttcatgagccaatctgcgtgttcctgctctaaatctacacttacaacattggtttttaagtgcgctgtaatttttgtgtacgtataaatatatttctttttattttttacgcgattctcagcgattatgtttttagctaaaaataggactttagaatttcctttaaaaacaaaatcatcatcttccagaagacagtcatgaatataatccggatgaacggttgttctcggaattttaaaatcaaaccactcctgaagcggaagttcaaaattaattccgtgcatataattgaataatgatttttttaaaccgaagctgaactttccatgatcgattccggttttatcagtaaaatcaacatcgttgttggcaaacagaatttcctgcttaataggagttactccaaattcttccggattaattccgacaggtgaatgagccgtcatcgcaaactgatgccagaatccgctttgtaaaattcccatctcgaaaagctgacgaaccatttccaaagaatccactgtttcctgaatagtttgagtaggatagccatacatcaaataagcatggatcatgattcctgcttctgtaaaatttcttgtcactttagcaacctgttccacagaaattcctttatcaatcaatttcagcagacggtcacttgcaacttccagtccacctgaaacggcaacacaaccggaaagttttaaaagaaaacacagatctttggtgaaacttttttcaaaacgaatattcgtccaccacgttacgaccaaatttcttcttaagatttctaaagcaacttcacgcatcaatgcaggaggagccgcttcatctacaaaatgaaatcctgtttctccagttgtccggatcaactcttccattctgtcaaccagaattttagctgaaatcggttcgtaaattttaatataatctaaagaaatatcgcaaaaagtacatttaccccaataacatccatgtgccattgtgagcttattccatcttccgtcactccacaaactgtgcatcggattggcaatttcaattaccgaaatgtatttatctaactgtaaatctgtataatcgggagttcctatatcggcttgcttataatcgtgtcttgtggaattatttttataggtaacttctccgttttcaagtaaaaaagttcttttgacttcgacaggctcagtcaccttcgaaattatattttgataaagtaattcaattggaagctctccatcatccaaagtaataaaatcgaaaaactcaaaaactcttttatcttttaattctcttaattcagtattcggaaatccgccgcccattgcagttttaatgtgcggataattttttttgatatatttcgcgcaacgaaaagcagaatataaatttccgggaaaaggaatggaaaaacaaatcagttttggctgaacaagctctaatttttcatgaagaatctttaaagtaaaatcatctataaaagtaggttcgccgcaaattttagaataaagttcatcaaaagaattggcactttttcctaatctttccgcataacggctgaatccaaaatcaggatcaatattttcaacaatataatccgaaagatcttctaaatataaagtagccaaatgtttggctttatcctgaagtcccatatttccgaaagcaaattccatatcatcaagctgattgaatcgggaggcttccggaagaaagttcatcgaacagatttgtcttgccaacgttgggattttaccctgcaaaaaagcaataacctgatcgatcgttttgatatattcttcttttaaaacgtaaattctttgagcattttctgaaagagcctgaagatcaattttctgattaaaaatcttctgaagtccgtctttcgaaaataattccaaaatgacctcaattcccaaatctgtctgaaagctggaaatatttttggtattcagaaaacctttaatgtaagctgttgccggataaggtgtgttaagctgtgtgaaaggcggagtaatgagaagtagatctttcaagagaaaatttttgcaaagttattttaaatattcagattctgaaaatttatgataggttttaaaacaaaaaccactgatcgaatgtcagtggttcttaaatttattttatatccagattaaatttctttgaaacttaaaccttgttctgccaatagtttttgttcctgctctttgtaatagccacttactaatttgtcgtgaatggcttcaaacgcagcaagagtttcattaatttcagcatcggtgtgagaagctgtaggaattaatcttaacaaaatcattcctttcggaattacaggatagaccactaccgaagtaaagattccgtagatttctcttagatctttcaccaaaagtgttgcttccaccggagttccctgcatcatcaccggagttacacaagtatttgtatctccgatgttaaagcctctttctttaagaccattctgtaatttatgcgtattttcccaaagttttgctttaatttcgggtcttgttcttaacagttccagtctttttaaacctccgattaccattggcatcgttaaagatttagcaaaaatctgagatcttaaattgaatttcagatatctgataatttctttatcacccgcgatgaatgctccaaaacctgccattgatttggcaaaagtagagaagtaaacatcaatctgatcctgacaaccctgttcttcaccggctccggctcctgtttttccaagagttccgaatccgtgtgcatcatcaactaaaagtctgaatttgtattttgattttaattcacagatttcttttaatttaccttgctgtcctctcattccgaaaaccccttcggtaatcactaaaattcctcctcctgtttcttgcgctactttggtagctctttcaagatttttttcaagacttgcaatatcgttgtgtctgtacgtaaatctttttcctgcgtgaagtcttacaccgtctactatacaagcgtgagaatcaacatcataaacaattacatcatttctacccaccaaagcatcaatggtagaaaccattccctgataaccgaaatttaataaatatgcagattctttctgaacaaaatcagccagttctttttccaattgcaaatgctgctcagtttctcccgacattgctcttgcacccatcggataaaacattccgaattctgcagccgcttttgcatcagcctccagaacttcaggatgattacacattcctaaataatcattagcactccagaaaataacttctcttccctgaaactgcattctcggtccgataggtccttctaatctggggaaaatgaaatacccttcaccataatctgcaaattgtccaagaggtcctggattttcttttattctgtcaaaaatatccaacattttattaatattttaagtaaaaaagccttttgtaatcacaaaaaggcttgatttgtataaatttttcgtccttatttaatgaattcagttttaaaaacttcatcgtagttgtgcacacagttgtttacaaacccctgttcagccatccatttatcactgtatactttagtaatatatcttgaaccgtgatcaggataaatcaacacaatcaggtcattttcagaaaattcatgagattgcgcatattgcattaaagcctgtgtaacggctcctgttgtataacctcccataattgcctcttttaaagcgatttcacgggttctgtaagcagacatttcgtcatttactcttacaaattcatctactttatcaaaaagaagggcagaagggattaaattttttcccattccttcaatctgataaggatgaacatcttctttgtggatttctccggtttcgtggtagcttttcaggatagatccgtctgcatccacaccaatgattttaatatccggatttttctcttttaaaaattttgctgaacctgacagagttcctccggttcctgtacacgcaaacaggtgagttacttttccctgagtctgttcccagatttcaggacctgtggtctgataatgcgcatcaatattcaactcgttgaaatattggttgatataaacggaatttggagtttctgaagcaattcttttggctacttcataataagatctcggatcatctgcgggaacattcgcgggacagatataaacagtagctcctaaagcctttaggtaggctattttttcaggcttggtcttgtcacttaccgcaagaatacatttatatcccttgatgatacaaaccatggcaatagagaatcctgtatttcctgaagtagtttctaccactacggaatcttcttttaataaaccttttttctcagcgttttctataatatgaagtgcgattctatcttttgtggaatgtccaggattatatgattctaacttggcataaacggttgcaggaatatctttcgtcacagtgttaagcttcaccataggagtatttcctattaggccaagtatattatcgtaaacattactcattatttgttatttttcaataaaaatctgacggcaaaaatacaaaaaaataaatttatttctaaacttttgtttgatttctaacctctaaaatagataaaaaattgttttctgttactatctaaagatgaaacttttcaaaaagcgagccaaaatctttaaattttgttaaaaaccgtctaaaatcatataaaagccttattttcgcgtaattgatttaatactatgaaaaattggacttttaagcaatggaacaccgttctcggatgggttgttttcgtcattgcatttttcacgtacttgtccaccatagaaccgaatttcagtttttgggattgtggcgagtatatttcctcggcggtaaaacttgaagtaacgcacgctccgggagctgctttattccagattgtgggtgctgtggcagccatttttgctttaggaaagggcgaaaattattctatcgtgatcaacgcgatgtctgcattgtttagtgcgtttacgatcttgtttttgttctggacaattacgcatttcgtaagaagacttttaaacaaagattttgatgagattacaaaacatcaggagatttctattctttttgccggaattgtaggcgcattatgcttcaccttttcagataccttctggttctctgcggtagaaggggaagtttattcgatggcatcaatgtttattgcacttttggtctggttaattaccaaatgggagaatgaatatcaggcgaaggacagcgagagatggataattttaattttcttcattttagggctttcagtaggggttcacatgatgtgtatgttggcaattcctgcgatctgtcttgtgtactacgcgagaaactacacttttacctggaagaattttctttgggcaaatgtgattacgctggtaattttagcaatcgtttttaaagggattttcccattgatcatgacgatgttcgggaaacttgagattttcttcgtgaacggtttaggtcttcctttccattccggaactattgctgcttttgtcttgatggttgttatctgttacttcctgatctcttatgcaggaaagatgaagaaaaatgtttatcagacaattgcattatccattgttttcatgatgatcgggttttcatgctggatggtaattcctatcagagcaaacgcaaatccgccaatgaaccttaatgatccggacaacgccatcggaatgctggattattataacagagaacaatacggagactggcctacaatttatggtcagaattataccgctttcttagatgcaaacggaattgagaaaaaagaagacggaagttttaatactgtgaaaacgggagaaatctacgaaaaagacgagaaaacaggaacgtacagaaaaacaggagaccgattcaattatgttttcaataaggctcatgtaggctttatgccgagaatgttcaatgaggacaaagatgtaatggctaactacatttcaatgtacggtgcgccggatttcacctttaattacagtaatgaagatgttgcagacagccctgaagcaaagcagattttcgacgaattaagaaagaaatatgaagacggatctattaccgctgcagattatttaaaagtaaaaccttataacttaatcaatgttcagaagccttccctggctcagaatatggattatttcatcacattccagaacggatattattttgtaagatatctgatgtggaattacgtaggtcgccagaatgatcttgaaggtaacatggaaagcacaagaggaaactggatctcaggaatttctttcattgatgatgctttatggggaaatcaggaaaaaatgcctgcaaaattcaaaaacgaaagtaccgtaaaattcttctttttacctttaattttaggattaatcggattctttttccagcttaacagagatttcggaagattttatgcaatgctttcaatatttgtattgatgagtgtgggaatcgttttctataccggagtaaagccttttgaaccaagagagagagattatgcaatggtaggttcgttctacgtttttgctatttggatcggattgggagcaggagcaattctctggttcttacagtctaaaataaaatcgaatgcagcaaatattgttgcaggagtggttcttcttggagttcctttcatgatgggcttccagaactataatgtacataacagacacgacagatatacttcttatgattacggatattctgtattgaaatcattgcctaaaaacgacattgttttcgtttacggagataacgatacgtatccggtttgggcaattcaggagactgaaaatttcagagacgatgtaaaagtagtcaactttacactggcttccacaccttggaatattgatcagattaaaagaagaacgtacaatgcggcgccggttccgggagttttaacgcatgatgattacagagacggtgtaaacgaccagatctacatgatgaagaaagatgactgggaaggacttttctctatgctaaaacaacagggagcacctccaacggaatttgcggaattcagaaaatatcttactcaggattccatgacgatgaaagaagcgatcagcttcctgaaatatacttctcctgcgaaaaacgaacttcttaaaatgtatttcggggaagaaaaattcgagaaatacaatatcttacctgtaaacaaattcattttaccggtaaataaagaaaatgcagtaaaatcaggaatcattaaagcagcagatcttccggatacagttaatcagatcatgattacatataaaggaaatacgctgtataaaaacaatttgatcttacttgatgttttagcgaatttcgactggaaaagaccaattaacttctcttcaggaggaatctacgacagcgaaaatattttcttcttagacgagtatcttcagtttgacggtttcagttacagattggttccaattcatactccaccatcacaaggcggagatatgggaagagtagatgccaattctctttacaatgtggttaaaaatttcagatggggtaacttcaagaatttaaatacgcattttgatgaaactgcaacctccaatatcatgagctacagatcttctgcaagcagagcagcagcagctttggcaacgatgggagaaaaaggaaaagcactggaactattggatttagcttctnnnnnnnnnnnnnnnnnnnnnnnnnnnnnnnnnnnnnnnnnnnnnnnnnnnnnnnnnnnnnnnnnnnnnnnnnnnnnnnnnnnnnnnnnnnnnnnnnnnnaagaatatgattattacatgagtctgagcaaatctgaccagagttatctgaaaagacagatcagaacaaaaccaatggaatattctttagtcatttctgccgttacagatgcttactcgaagattggaaagaaagataaagcgtatgattatctgataaaatccatcgagccgattgataagaaattcaacacttttgtagaaaatcttaaagaaatgggcaaagaaaaagcgatgaaggaatctgagcaggtacagaagatcactcctttctaccagtatcttttcgatgtaatggaaccttttgattccacttacaccaaagaaaaagaggcacagatcaccaattcgattattaaagcaacgcaataataacaaaacttaaaacggaacttcggttccgttttttttatatattggggttcagaaattttaagattatatttgcgatatcaaagaagcacaatggtagagacgagaaataacaaaatcccggtgtatgctgtaatttttacagtcgtttttaaacttttatttttacttacaaattatattcaggaagatgctttcattacgtggagagttgcacaaaaccttctggattacggagtgatcggcttcaacggcgatacgaagatatctgcttctacaacgcatctttatgtttttgtttcgtatctgtttaatttaattttcggaaaagaaaattttatagaaccgcttcttgtttttaactcaatcctttttaccatcggaagtttatttctttcgcatctggttttaaaaaatgtatggcacaaagccatttttatctttttaatcggaattttacctccggcaatcaaaatttccatcctcggaatggagtacggaattcttttcttactggaaatggcattgctgtattatggctttcataaaggaaaaaaatgggctttcatcgttttaccgatccttattttattcacaagaattgatacaattatatttttaggaattgtatttttaatcgatcttttctggaataaaaaaataagatggagctatattttaggcggtattttaggaatttcagtggtcttggctttcaactggttctactttggagagttggttaacaataccattattgctaaaaaattagcgtatgataaaaactttacattccagcaaaatgcagaatatttctggctgaacttcggaaacttctggggaatgctgaaacttcccggagacttcaatccactgactgttttactgctgattttcgaattgctatgcttcatttatttggtaagacaaaaagacagaagaaacattttcttatggataatcttcattttcggatgggtgaaacagcttattttcctttctcaaaaaagtcttttcgactggtattactgggttccgcagattttacttttcgttccggttgtaatttttattttggagcaaaaagtaaaaagaaatctttggctgtctttattaatcgtcatttatatcattccgatgctggctttccagacggtgcattcaattgctacaggaaacggagaatggaattacagaagaacgatcggaacatttttaaaccaatatgaaaaagacaaaaaccaatggattttcctggaacctgcagggtatgttccttatttttcagggttaaaaaccatcgatgaagtaggtttggtcgataaaaaagtacaggaagaaatcaaaaaagacaagccgaatttctggatcaataccgtgaaaaacagaaagcctaaatatctactttcttacgatgatctttttaaatcaaaaaatgctgagtatctgaaagttcattataaactgatcaaagaattccgtgtaaaagaccatctgaaaagcgacaataaaattttagagaaaatctatattttgaaaccttccggaacggattataatttatacgaaagaattgattaatttggcgggaggatagaagaaggaagctggatgcttgtaaagactcatcaactccaaaaccctcaagctctaatacactaaaacgactaaaactatgaaatactgtgcatttctccgtggcgtcaacgtaaaaggaaccaatatgaaaatggcggaagtctgtcaggttttcaaaaatgccggaatgagcggtgtagtttcagttttagcttccggaaatattattttttcctctgataaaaaagccgatgaattaaagaaaatcctcgaaaaggcaatgtcagaatatttttcttacgaagcttatctgttcatcaaatctcaggaggaaacagaaaagttttggaacggaaatccctttgaaaaaaatgatgatctccatatctatgttttcgtaacgaatgatggtgtcgaaaatagtttaatcaaggaattcgaaaacgcttcaaaaacagaaaatgaaatcgctaaaatcgtcaataacatcttttattggcaggttccgaaaggaaatactttagattcagcttttgggaaaattttaggtaaaaaaagcatgaaagaccagtttacaagcagaaatatcaatacttttgagaaaattctaaagaaattttaatttaaaattctctcgcagatttggcggattatgcagatttttttgaaactattttataattaaattttctgcataatccgccaaatctgcgggaataaaaaaataattattgtaaaaatttcaaaagaccaaaactattgtagtcatagtccgttaaaccctctaaataatttcggatttccgaactttctccctatttttactgaactttttaatcaaaaaataaaatgattcagtatttagataatatccaccacaaagattccagaaactttttcctaattgccggtccctgcatcatcgaaggcgaagacatggcactgaaaattgcagaaaaagtggtagaattaaccaataaatataatattccctacatttttaaaggaagctttaaaaaagccaaccgaagcagagtagactcttttaccacaatcggagaagaaaaatctctggaaatccttaaaaaagtaggagaaacattcaatatccccacaacaacagatattcacgaaaacgaacacgcagctttggcggcgcaatatgtagatgtgttgcagattcctgcgtttttggttcgccagacagaccttttggttgccgcagcacaaacaggaaaatgcgtcaccttaaaaaaaggacagtttctctctccggaatccatgaaatttgccgttgaaaaaattacagactcagacaatcagaaagtggcgatcattgaaagaggaaatacctttggttacacagatttggtcgtagattaccgcggaattcctaccatgagaaactatgctcctgttattctggatgttacccattccctgcaacagccgaaccaaagttcaggagttacaggaggaagaccggatcttatcgagaccatcgcaaaagcaggaatcgcagtcggcgcagacggaattttcatcgaaacgcatcccactcccgaaaccgctttatccgacggagctaatatgttgagactggatcttctggaagatttactgcaaaaactaaccagagttcgggaagcaattttataattaaattctgttaaaactttcattttttatctggagctttttcccgctttccattacaatcttttttttgcaaaaaaggattttcattacaatcggggctaggatttcagtctgtatttcaaggacagaaacagatacaaatcttcaaaaaacttcagataagaaatgttaaataaagtttaaataagttaaaataaaatttatatattcacgtttgaaattttaaagcatttcttttgaaaaaactagttttaccattgagccttatggttcctgcattagtattctctcaggtaaagaagaagaaggatacaatgaagaccgcaactattgaagaagtagttttccagaaaaaagtaacaggaaaaaccaatgatatcaccgccgtaaaaatttcggcaaaagatgctcagaatgtggcgagtatttccggtgggatcgaaggaatccttaaaactttaccttccgtaaactcaaatacggagctttcttcacaatatatggttcgtggcggaaactatgacgaaaacctgatctatattaatgatatcgaaatttacagaccattcctcatcagaaattctcagcaggaagggttaagcatcatcaatcccgacatggtttccaccgttaatttctcagccggaggtttcgagccgagatacggcgataaaatgtcatctgctttaaatatctattaccgtgaacctgaaaaatttgaagtttccggagaaggaagtttaatcggaggaagattatccaccggttttgctgtcggaaaagacaaagaaggaaacaggaaattcaccgctctattttcaggaagatacagaaataccaaccttgttcttaataccctgaaagaagatacagacttcaatccgaaatacatggattttcagacgtatctgaattatcatttcagcccgaaaatcacggcttcattcatcggatattattccaagaatgattacgaaatgattccgaaagcaagaagtgtagacttcggatctttgcagcagccgattaatttaacagtaaattacggtggccgtgaagacgataagtataaaaatatgatgggaacattctctctgaattataaaccatccgataaatggagatttactttagacgcttttgcctaccaaaaccgggaaagagaatattacaccattgcttcggcttacgttttacagacttttgatccgatcacgggagaacccgttacttcatacgatactggcggacaaatagagcatgcacgaaatgatttatatgtaaaaacatacggaacgcagttcagaacccgtttttcgcctaacgtaaatacagatattgaagtcggcttcaaatatgaaaaagaaaacctgaaagatcttaccaacgaatggaagctggtagattctgcaggttacagcacaccgatttccgcacttttagatcccagaaatccgccggatctaaaattatattacagcattgcagggaaaaatgatattcagccgacaagaatgtctgcttacgcccagtattctcagaaatttttctggggaagcaataaagtgtttgtaaacgccggagcaagagtttcgcactggagtttcaataacgaaaccattttctctccgagagcgcagtttgcgatcaagccggattgggataccgatatgttgttcagactttccggaggtatctattatcaggctcctttttacaaggaaatcaaagacttagacggaaattttaattcaaatataaaatcccagaggtctattcaggcaattctggcgaacgattacgaattccagatgtatgacagaccgtttaaactgaccacggaattgtactacaagaaaatgaatgatctgattccgtatttcatggacaacgtgagaatccgctattccggaaaaaataatgcttcgggttatgcatacggaatcgatacaagattgttcggagaatttgttcccggagtggattcctggttatcggcaagttatgcccgagtgtatgaaaatattgatgggagaggagacattccgagaccaaccgatcaaaggttaagatttgcaatgttctatcaggattatatgccgagattcccgaaaatgcgcgtcaatcttacattaacctacgcgatgggattgcctacaggatcgcctatcgtattggatgaaaacagaaaaatagattatctcgcaggatattcctatcaaaaaacattgccatcttataaaagggtagatttaggactttcgtatgccttcatcgatccgaaagaaaaaaatcaggcatatggtttttggggaaattttgatgaactaactttgggcgttcaggtatttaatgcgtttaacatcagaaataccgtttccaatcagtggattaccgatgcgaatactaatctgatgtatcctgttcctgtacgtttaacaggacgtttcttcaatgtgaaacttgaatttagaataaaataaatacagactcctgaaaattttcgggagtttttttatttcctgaattttataacatctttacaaaattttataacgaagattgtcttcatatttttaactttgtctcaatgaaaaagattcttgccatcctgttctctgtattctacttcggtttttcttccggagcggttttcagtgttcattattgcatgaatgagctggcttccatcagtcagaaaatggatgatgtttgcagcaaatgtggcgtaaaaaccaagaaagactgctgtaaaaccgagatcaaagttgtaaaagttgatgattcccaaaagtcagatcttcttaaaattgattttttaaaacaaatctatcacattcacaaaaacgattttttcttcgtagatcattctttttcggcaacaaaatttactcagattcagatcaatgcgccaccggaaaaacgctccgttccgatctttatcagtcattgtaattttagaatttaaaatctgtcagtcgtttgatcttttgatcattacgaacgacaaggcttgtcgctttacgcgatttatttactaattctttcttaaaaattaattctaaaatttaaaacaatgaaaaaatatatcattacagcaatattctcattattctcaattatttcaatttcagcacaatctaaaaaagatgcacaggttacaaaactataccaaaattatattgttataaaatctgctttggcttcagacgatgccgataaaacatcaaaagcagctacggaattcattaaaacagcttctacaattgattacaaacaggtttcggaaggaaatttaaatattctaagaaaagatgctactgcaatttctgaagcaagaaacatcagtacacaaagagaaacatttatgaatctttccgataatatgatcgctctggcaaaagaattcaaagtttctgaaaatccggtttatgttcagtattgtccgatggcggatggaagctggctgagtgatgaatccaagattgtaaatccttactacggaaaatctatgctttcctgcggaaatgtaaagacaacaattaaataatattcttattttattataatataataagttgtatagcttaaattaaaatttactttaatatattgatttggagggtattccaaaaatttgagatcttagttaagtgaaacgcctttgtgaacttaaaaatattctcaataatttcaacaaaatctttgcgagtttttgcattaaaaattaagtgattttagatttttcgactccacatcatttcgctcaaaatgaaagtttttaaaatttaattcatgctatacaattttaaaaaacttcgaaatattatgaaaaagataataatatttctgctgtttttattctttgttttcagtttttcacaggttacaaaaacctatttcacttgtccgatgcatcctgaaatcgtttcttcaaaaccgggagactgcccgaaatgcggaatgaccttaaggaaaaaagtagttgctgtaaaacctaagattatttcaaagctggaagcaaaacctgcacagaagacagaaataaaatcaaaagaaattaagaataaggataatgctaagattgagaaaaagaacaattctaaaaaggcaaaaaaagcagataaatcaaatgtttctaaacctgttttaaatacatctgagactgaaattttaaaacaatcaaaacctcaatctcagcctcaaaaatatacctgtccgatgcatccggaaatcatttcagacaaacccggaaaatgtccgaaatgcggaatggatctaatagaaattgaaaatcattcacagcatcaatctgatccggaaccaaaacctgataactctgttttaaaaagaaattcggaaaacggcagagtaagttttggaggaaaaacggttcgttatgatttatatgtcacagatacgatcgtaaattttacaggaaaaaaccgcagagcaattgctgtcaacggaaaattacaggctccgactttgtattttacggaaggcgatactgccgaaatttatcttcacaatatgctcaaagaaaacacaggatttcactggcacggcgtaattttaccgaatgaacatgacggagttccgtatttaacgacaaaaccagtaaaatcgggagaaacgcatctgtataaatttaaagtttcccaaaacggaacctactggtatcattctcatgaaagtttgcaggaacagatcgggatgaacggaattttggtctttcaaaaaagagaaggagagccaaaagtaaattatactcaggaaatccctgttttactcggtgattggagtgacgaaaatcccatgcagattgcaagacgtcttcacatggcaaatacagattggtatgccattaagaaaaattcagtgcaaagttactgggaagccataaaatccggaaacttcgggacaaaagcgctgaatgaatggaaaaggatggaagccatggatgtaagtgatgttttctacgataaatttctcatcaacggacagccaagctctgcttattccaatttaaaagcgggagataaaatacggttaagagtggcaaatggaggttcatccacttatttctggctgaatttcggaggcgggaaaataaaagtagtaggaaatgacgggaatgatgtgatttcggtggaagtcgaccgactgattgtaggagtttcagaaacgtacgatattgaagttaccattccggaaaataaaagttttgaatttagggcaacttcggaggacagaattggtcacgcttcgctctggctgggttcaggggaaaaaattgaagctccaaatttaccacggttaaagcttttcgaaggcatgaaaatgatgaacggaatgatggaaatgagcggaaatatgaagccgatgaacatgacgatgggcaaccagatgatggacatgaacgaagtcatgtatcccgaactttctgaaagtcaaagaaaaatgaccatgaagcatatgaatgaaatgatgggcatcaaaacccaagaggaaaacgaagagcattccggtcattcgatggaaatgaaggaagaaaaatcaattaaaagattgtcttataatctgttaagatctcctgaaaaaaccattcttccgacagaaaacgtccgcgaactgaaatttactctggagggaaatatgaaccattatctctggactttagataataaaacggtgacggaaaccgataaaattttagtcaaaaaaggagaaattctgaggattacaatgtataacaattcgatgatgcgtcatccgatgcatcttcacggacatgatttcagattaatcaactcaaaaggtgaatattctccgcttaaaaatgtggtagacatcatgccgatggaaaccaatacgattgaatttgctgccaatcaggatggtgactggtttttccactgccatattttataccatatgatggcgggaatgggaaggattttcagctatgaaaattctaaaccgaatccacaactacccgacagaaaactggcttggaaaaattttctgaaagataacaggatgatcagctcaatggcaatgcttgatcttaacagcaataaaatacatgctgaatccataacgatgttcggaccgagatgggcaaatttaaatgaatttcattcgaactgggattttgatcattttgacggaaattttaaagtcggcagatttttagggaaattccagtgggcaattccttacgtgggtttcagaattcagaaaaatcatgaaatcatggaacgaaaaatggcagaagaaatgggaatggattttcatggaaaaaaaacatggttcggacagcagaaagcttccaaaactcagggtgcatttatggtcgggatgcaatatctattgccgatgctcattacagcggatgcaagtgtagaccagaacggaaaggttttattggagttcagtagggaagatattccgctttcaagaaggcttcgcggaaattttatggtcaattccgatggcgaattcaatacaggtttgcgctacattttacagaaatggctgtcagtttccgggaattatgataatgaaatgggatggggagccggaattacccttacttattaaagtttttataaaacaatagaatatttaatccttcaagatttttaaattttggaggatttttatttcctatagactgcacaaaatttatatgagaatttgctttataattatctcttgtgccttttgctgtttacattcgaaaataattaaattataaaaatatccgtgaaaaatgtctgggaactacatttccagtcgaatcgttttttcaaccagtttttgattaaagctttcaggaaccagtctgaacatgaaattccttacaaaagttcctctttcccattgagaaatctgtccgattttccagcttgtatcgactacataatctactttttttctcctgatcttctgaaaattttcaaaaacttcattgaaattctgattgctttccagcagctttccgataatataagcatcttcaatcgactgacaggcaccctgtccgagattcggcgttgtagcgtgtgctgcatcaccgatcagacaaagatgattcgtgtgccatttaggaataggagcgaggtcgataatttcgttaaaaatgatattttcctgaaatgttttctctataatttcaggaatcagtggatgaaaaccgtaaaaattttcagctaattgattttcattctgatgaatgtttttattaataacagcgtaccagtatatttttcggtcggtcattcttacaaaaccaaaacgttttccttttccccatgcttcaatggcttcgtggtggaaattttcaggaagatcaaattctgccaatccgcgccaacacagttgctgtgtatttctgatggttccggttccgaaaatctgctttcttattgttgaatgaattccgtccgctccgaaaacaattttgctttcagtttcagttccgttttcaaaatgtagaatgtaattttctttcttttcaattttgttcagcgcatgattcagttgaatagtttcatagccgatattttccgccaaaatcttttgcagatcggctctgtgaatggctacattgcatgaattgtactttttttccaattccagaacattggttttagaaatacgtttcagtttttcatctgtaatcgaaatgccgtgaattttgtttcccgcctgttcaattttttcttttaagcctaacttatcgaaaatctgcatcgcgttgattgccatcataattccggaaccgacaggttttatttccgctgccgattcatacagggtaaaatcaatgttttgttgtttcagtatatttcctaatgttaaaccgccgattccgcctccgatgatggatatttcattcattattttagatttttcaattcgttcagaagttggttctgtttgctgatgaaattatccagactgtctgttttcagaggatgtgcattctggtatttctcaatttctggaagggtttttctgattttgaaaattgtatacgtatcgtgaattctttcacggttttttgtaatttcttcaatcagatcttttattttcttcactttaagattgtattgctgttcacttctcttaatttctgcttcaattgcttttcgtgatattgaatcgcttacagatttagccaaagattcagcgttgctgtaataggtttcagatttgctaatgacgtcatcatattcaagagtagcatcgtctgttttgctgtcgatcatacttactttttcgtcaagagcctgaagatttttatcgtttttaagcaattcatcataaatctgatgaaccatatcatcttcacgggaagaaagtcttgttccttttgttatggagcctgaagcagaagattccgcattgtctactgcattttcaaccaaaggtttattttcggatctgctttcattgcaggaaaacagggctaaaagcagggtagaagtaaaaaataattttttcatgttgtgtatatatttaatatgagttcggataagtcttcttaaacgcaatgctaaacaaagatattcaattattaagaattcagcttttaagatatacaatggcgtaaaacttattaaagtaatactattttgtcttttttaaataaacgaagtgcctttgtttagctacaaactttcaataagtaaaaaaatcttttgtttttctttgcgataaatcattatagtgttataaatcaattatttaaagttatttttttatccgaactgaagttatttaatttttgatttcaggaattaaaagatctgccggacttatcgtgaaaaacagatcaggatagacaaaatccagagaacggttttcttcacctctcagccggaaaaactctttttccttttcttcatcggctaaaataaataattctccggttgaaaaatacggttggttgtctttaaatctgataaaagttttggaagtcctgaacgtcattcccaaccatctgttatccgtaaaatctttggaattaggattagaattcagaacaattttatgctgaaactttttgttcgtttctacagaaaatagtacaacagaatgatgatccagtataatttcagattcttcttccgtgattttgtcttttataaccagcttcctgagctgattttcttttaactgatctggactttcatagcatgaaaacaaagcaataaatgaatgatcttccagatccaaagcctgatcggaatgaaaccccattttcgagtacgaagaatcatacacttcaatcaatgcattgttgaaatgctgttcaggcacatctgttttttcggctgaaattgtttggttaatttgttcaacaacggaatgatgaacctcagaaaagagattcgccggaatccgatatcttgtcgttgtccttacaacaggaatagttccgttttcttctttcacgagatgatttccgagcctgccttttcctgttgcttcaaaatccgcagaattcaagagattttcaaatgtattttgcttttcaggaagccgtattttataaaatccggagttgctcattacaggattggtttttcataatcgcccagattcatgctgaaatgggtggttttatagtttaccttattctccgtcatgttctcttcgtaataagaatcgcgcagttccgcctgcatttcgggagtcatgctttccaatttaacataattatcactttctttgatgtaggtctgattgtctttgtacatcgcctcaagattcgaacaacgaacaacatatcccattcttatcggaatctgatcgactcccaaaacagaagggcggatttcatgcgtatataatctattggtagacagcggaataataaacgcagaatcaggatataaagtaacggtaaattctttttccagagattcgtcttcaactgttttcttgagcctgaaatggagccttgttaatgcgctcgtttgcttataacacacatcgaataggtctttttccgatggtttcaggtattcggaattggaatggtcgtagaaagtacagaatgcgatcagtccttctttcggcatatctttcgttttgtcggagtgtgctttaattttagctttcacttctttttcagcgtcggaagttttctttttgttctcgtaaatctgtaccaaagcgtgattcagatcggtttcatattcaaaagtttcttttgcacattcgttaagaagagcaataatttttcggtcggtttctctgaaattatctgtcggtcctgtaagattactcgaacatctcaacaaattaaaatgcagcatttcttccccattttcatcggcttcatgagtcactttactcagataaatgccttttctcagagctttcgcttctttattggattctgtaagctcctgaaaacgatgttcagattttactttttcaaatatattctcctcatgaaaaattcttcggaaatacactcccgcattgcttacaataaccggaacttctccaatttgaataacctttgatttttcttcgctgatattttcaaaattcaccgaaaattctttaatgatatgcaggaaatgatggtctttctgaataatttccaaatttccgcagatgtatattttttgatgatcaagttccgaattaagctcatgaactacggttccgcagaaatgatcgatgatgtactgaagttctgcattgattttctgactgttatttaaaacaacaagaacatttttgtcttttgatattttgttttcttctgaatggttattcatgtttcttaattgaaaagtgaagatagctaaaattttaaatgttttcaaaatcttaaagcctttaaggaataaatacattgattttcactcagtttttttaagctaaagaggcttagaataaaatattcttgttggaaaacgtaaagacgcaggttttttattaatctcaaatcaaacttaaactaatttcagaattaaccacaaaaggcacaaaagacaatgttaaagcgaatttcaatactattcaaagcactcaaaagaataaagaaagatttttaaaaactattgtgaactttttcatttataatgatcaactttaaataaaagtttagtcatcttttgtaccttttgcggttaaataaaaagtttaagcagactcatctttaagatgctagaaaatcaaagattttcaataaagattgatgcttaattttatagtagataaaatccaaattttagaataaaaaagaccatcgcaatgacggtcttacctgttttttaatttcggattaaaattttactattcatatttggaaaaatcaaccgcaaaaatgcatcggtttacctgacttccgttttgtgctcctgcattcggttcatattcggttaagctccacaagtaattatattgagattcataataaagagattccgctccgtaaggccatctgaaacgtaccgtatcatctgcaccatcggtataacgcgctaatcttgcgtttgatccgtaagaattgcttggagatccggtacaggaaagccatgttctgttgccttttctgaaaacgccctgaattccatgcgcatgattgtctgtgaaaagactgtttttcggagtcacggttacaattcctgtattctgaagtcttccgttcgtatcaaccggaaaaccaaatactttcgggacaatagaagcatcggcgctgcctgaataatactttcctgtccagaactgcgttccttcatcatttacctgaatcgtagagaaaggattcgcgttattgattttctgatatcctgtctgtggcaatatgtatctgtaattgaaagcgaacaggtttccgttagaatctttaccacatttatcattggtggtgtctcccgtgcttacttcaataattttattcagatcgaaaacacgaacgcctaaatttgtgctgctgagatagattttacctttaaaataggcaattccgcctgcatgaacattcaacggagcgtaagaaccatattgtgaatagcctgttgtacctgccggaatatcgggctgaaccaaaagaatatgacggtaagtaagatatgtactggaactcggactgatgtcaatcagggtaattcgggaacctttaaattcagcttcatctttcgcgtaccaactcaccaaaagataacggactccatctttagtaaatcctgaaattccctgcggtctccaaagcgaagttgtttcatcatcggtattccagcggattcctctcactctgttttcttcaggaatattgaatccgtagacttcggtataagcacttccgccgattgcctgacgatttttatcaatctgtgaaggatttaaaaagctgaaacctgaattgatgaatgcgcttgtatcggtgtaagcatttacacttacgtctgcggcagctttactgagactggtttttgaagataaattttcttcttttaaatttgaagcgatgtcattatctgtacatcctatgctcgttatggtaagcaaaagcatccatccgaaaagttttctttgaatcatgattaatttaattacttttttaaattacaaattgattgcgaaactatcagattctttttttatccggatttcgtacggattaattatgtattaaatttatattttatgagtggtcaattattataaatattttgaccgttaatataattctctaagtcaaaatctttatttttaaggttaagatttactttaatgcttccactggaattccttatttcaagtcgttcttttactttttgttttgtatcgtaagaatatttatagaatacacctgaaaaattctcataacttttagttagctgaatgatgggtttattgattgtaaggatgaaaatttcgtcattcagaaaaacaatatcaccttttctgtagcttatttttgcgcctaattttgaatagccttctatctcggtttccacatttcgaactaaagtatattctctgtctctgatgaaatcataaaaccgtttctgtttatttttatttaagaagtaaacgaatatattcccgaaaataaaaatcaggataaatcctccaataaaaagttgtgattcattcatttcagcaaaaataaaaaagcggaacctgaaaataaagctccgcgtcgtattgtttcgttaaaaattacttccctaaataagattttaagatcttacttctggtgttgtgcttcaatctcttgatcgctttttctttgatctgacggactctctctcttgtaaggtcgaaagtttccccgatttcttctaaagtcatcggatgttttccgttcagtccgaagtataatcttaccaaatctgcctctctcggagttaaagtattcaatgctctttcgatctcaatttgaagagattcaagcatcaaatctttatccggacttggagattctcctgaacgcaatacgtcataaagattagaatcttcaccttctaccaaaggtgcatccatcgacaggtgtcttccggagtttttcatcgattctttgatatcttcctcgctcatgtcaagaacttcagccaattcttccggagaaggtggtctttcgttttcctgctcaaggtgagcgtaagctttgttgattttattgatggaaccgatcttgttcaacggcaatcttacaattctcgactgttctgccaaagcctgtaagatcgactgacgaatccaccaaaccgcgtaagagatgaatttgaaacctctagtttcatcatacctttttgccgccttcatcagtcctaagttaccttcattaattaaatcgggtaaagaaagaccttgattttgatattgtttagaaaccgataccacgaaacgaaggttggctttaattaatttttccagtgctgctctgtcgcccgcacggattctctgtgccaaatctacctcttcgtccgcagtaattagttctactttaccaatttcctgcaaatacttgtctaatgaagcagtttccctgttggttacctgcttagtgatttttaattgtctcatctattttatcctcaaaaaagagtttctattatattatacgtatgaaacagtaaaaaggttacactggttacaaaatattttcatttatttaaactcagtttgaaaaaatagttgtaaattatagctctcacttcacagaacagcgattttagggctttttagatcttcaataaatttttaaaactttttgcataaaggttttttgcgctcgaaatgtatgctcaaatcttaccaagaaacaaatctttcaatatacttttttagatgctttcagcatgacaaatattgtgaactcagttcgggatgagagataaatttaaataattgatttacagtatcctattgatttatcgcaaagaaaaacaaaagattttttatttattgaaagtttgtaagctaaacaaagccacttcgtttatttaaaaaatacaaaaatggtattactttgagaagttttacgcctttttatatcttaaaagctgaattcctgataattgaatttatttgtttaaccttgcgtttaagaagacttatcccgaactcaggttatttaaaataaaaaagcgaaaccgaagttccgctctattatttaaaagtgaaaaaaattgacttttaaaattcaccattggtaattcactttaaaaaaggtcattcagcaattttgccagtctcagacctccatacaaaagctgtctttccattgtatcgttaaatttatactgataatcgtaagacagtttagaatcattcggcgtctgtgcgtagattctgttggcaattttgtgagaatcgtacaaccagtcttctaaagttccggtctggatctgttttacttcctcatcagacttgatgtccagtaattttgcatattctgtgtagctgtatttctgagaatctaccagttttccgtcccagacagagtgtaagttggatttttctccgaaataagttacattaattttgtttcctcccaaatcttccgctcttcctacgtgtaaaggctgcgcaagatctcccatcatgtggatcaggaaaattaaagcgatttttctgtctttctcagaagttttttcgtctttaatctggcttgacaacgttttgatctgcgtgtataaacttggtcccgcctgagctttaagtttttcttcaaatactttaaaatgtgtctgcggatcgatgtttacataatgccacgctgaagtctccttccagactcctgtagtatcagatttaatgaaatccggccagtttgcccagtacgcaagacgttctctccccatcatttttctgatctctctttttgcctttccggaaaggtgattttctgcgatctctgcaataattctgtgtcccgttaatccccacgcataagaataaagcgaagatgccatgaatgctaaaaccagcattttagaataaatacttttcattgtaaaataacattttcaggggacaaagatacggttaatttaaggttcaggttaagcttgaggataaggattttaaaaattaacgtaatcttaaacataatccaatataattttcatatttctaaagtctatttttgaattattattttcagttattttgagtttctgatttattttattcttttaaattctgaaaatttagtatatttagtaagaatttagtggaagaatattttttcaataattcgagatatactatttttacaagccaaatcacaggaaaaaccatgtatgagaataatattgtagacatgcaatacaataagctgcagaccgacttcaaagcggaagctgtagccgttaaccttttaaaataccacagagcggtaagcaatatttttatcgacaggatcgggattaatgaccgtgcttatttaaaggatattaaaagtatttcgagcgattatctgggttttgacgaagaagtttttaccatagaaacctacagagaaggaatttacgattatcttcccgaaggactttttcatccgccttctttaggtgcttcccgaaaaaatgtagacaccgttgtccgcgaaatccgcaaacagaaaagagtggaagaggatgcccgaaagtttttcaaaccttttgagctggaaatattttttacggagatcagtgctttactgaaagaatttgactttgacatttccagcgacacagatactcttctggaaaccgtaagtgagctttggcctttgattaatcagttagacaagaaaaatgcctgtatttttatttatattttacctttctttcatcagatcagaggaaataaatcatggtttgaacgttgtatgactgcatttttacagactcctgtaaaagtaacttttgccccgaatgttattgacggagtggaggaagaagatgattctatgctgcttggaaattccagattgggagttacttatattccgagcggaaaacatatggacggacaaagaaactgggtaataaacatcggaccgattccttataacgaaatgaaaaaatatatagacggaagtccgttccggaaaatattgcaggcaatgtatgattatttcctgcctgtaagtgtggatgtggaagaaaatttcatcacagaaaaacaggattattcttttgcactggaagatgatgatagaaatgcaaaccggctcggttactctacctttctgtgaatttttttaactatatttacaatcaccaagaaaaatattaattcgaaaaaagacaaatggaaatttcttcagtaaaaggaatctttttaaggtatattcttatgcctttatttgcggttattatgatggtcattttaggaatcatcagaaaaaacaaacccgcaattaagatcaaaaccattatcatctatgttctgctgtgcagtttatgccttgcaattccgggtattttcgggtttgcaggaaatttattcaatccttactggtatttaattgcccagatcatttaccttattttaggaattattcatgttaatttatcagaccggtatttcaaaaaacatttcagttctaccacaaaaagtattttgtttgaatcgattctttctttaacgtgcatcggattcggagggtatcttttttacctgattttcggctggatgagtcgtggaactggttatccgattatggcagcgacgagtattttcatatttattgttcctcttgtttttcattactgttatgtccagttaatcagcattccggtggatatttataaaacctggaggtattctccggaacagaaacttccggattttgaaggggcggatttcgacagattaatggttttgaatgtagaattaagcaaaaaccttgaggattccaacagattcagaattaaagcaaaaactttacctaccggaattactttcggggactggttttacagagttgtggacgattataaccacaaaaatcccaattccgttattcatcttacggatgaaaccagagaatcctattactggatcttttataccaaaaaatcatttttcagcttcaggaaatatatcgatttcgatcaggatattacagaaaacagaatttctgaaaacgatgtcgtgatctgcaaaagagtgatccagcatgaagaggaaggcgtaagaaaaccacagcaaaacaccatctaaaatattaaatatgatacagcctataaagcattttgccattaattgggttgatgggatgaaggtttcccagagacatcttaatgatcaggacaattttttaatcgataccatccgagattccaattctttgggaataacgacctataattacggacttttaccgatctcgaataactttaccgaccgaactatttttgatgttcataataccgcaaccaatgatgttcagttggttatcaaacattgcagcgcagttaccatggcgggttacagaattgaactgaacgacaggagagtgagcgtaaaatctctggcaaaatccatgcatgaggaacaggcagacggagaatattacatcctgatttcggtaaatccttttgataaagttccttttggagatatcgatccggaggaaattccgccccgtcatccgaatgcacaatcgaatcaccatatcgaattgcttcccgtaacatctctgaacagcagctattcgggaggaaattatctgatcatcggaaaagtagatttaaaaggaaatattgcgcaggtagattctaattttattccgccatgcacatcgattcagagtcatcctgcgttgcttggttattataataatttcgcaaaatccattgggaatttacagcagtatgcttttaaaattattcagaaagcttctcataaaaaccagaatacggcattggcacaaaatgtaaaattcctgtgcaataccatgatcgatactttcggagatatgtattttcagttcagaaatattacgccttatcagccgcctgtatttttaattgaatcttttgcaaaacttgcactccgcctgtataatgcgactcaggttctggttcctgcagaattggaagaaatgctgaattacagtctggaatggagtgaaattgcccctcatactttacttaatcagctatcaatagttgctgaaaccaattacgatcatcataattgcggagaaccgtttctttacattcagcagatgctgcgaagtctcgaaacgatctttaccaaactgagtgaactggattatattggtcagagaaaagaaaatattattgttaacgagcaggaagtttccaacaataataacccgaaaagagggtggagcgttttggattagtaccgaaacatatttaaaaatataaatcccgagactaaaaattcgggattttttgtgtaaaattgttagacgttaaatttctttggaaatcagattattgaaaatgattattctttcgtcagaattaaaaagtaataaaaaatgaatgtagctaaaataagagaagatataagaggtctttcggacggaaaaattttcatgaataatgcaggatcttcgttaatgccttcaatcgtcgtggattcaatgattgattatttaaagcaggaagagcaattcggaggatatcaagttgcgaacagaaatgctgaattatttgaagaattttatgaggaaactgcaaaactgattaactgtaaaccttccaatatcgcctttgcaacaagcgcgacagaagcatttgcaaaggcattatcgagcattgtttttaaagaaaatgatgtcattatcacaacggttgatgattatatttccaatcagattacctttatttcgcttcagaaaaaattaaatatcaaaatcatcagaaccagaaatcttcccgacaatgagcttgatctggaagatcttgaaaatctgatcagaaaatataccccgaaactggttgccgttacgcacattccaacaaattccggactgattcagaatgttgaaggagtcggcaaaatctgtaaaagatataatattttgtatttggttgatgcctgtcagtcagttggtcaaatggtggttgatgtaaacaagataggctgcgattttctgacggcaacaggacggaaatttttgcgcggaccgagaggaacagggtttttatatgtttcggataaagttctgcaacagaattacgcacctttgctgttggatatgagaggagcaaactggacggaatacaatgattatgaattgtttaaaacagccaaaagatttgagcactgggaaatttcctatgcttctttattaggagttaaacacgccatacaatatgccaaccatatcggattggataccattgaagagtacaataagattttatctgaaaaattacggaacagactcaaagacagtggctttgaagtttgggattggggaaatcatctgagcagcattgttacattttccggtccggatggagatctggaaaatattcagaaggttttgaaagaaaataatgttttcttttctgtaacgtataagaattcagcgttaattgattttacaaataaaaaaatcaacggaattgtgagattatcgcctcattatttcaatactccggatgagattgaacgggtttctgaaatactgaagaatagtttaaaataatatttatccgcttcgacaagtttaggacattgcttaaaataattaataagtttgtttaaacttttttaccacaaaagatgcaaaagatttaaacactttagttttttaagtttaaaaatcaaagtttttttttctttgcagacttttgaaatactttaagtaaatcctataaagtcttttgtctcttttgcggtttattctgaatttagtttaaacaagtttaatatgagtgagcctgttgaagcatatatttaaggctaaaaaattattttttcaccagtattttttccgtcgcttttttgcttaaaacttcctgtttcccttcgatttcgatggttacggatctatcaaagctttcaattttaataattttgatttttttattcagaagtaaatttctttcggtgagataatttaaaaaagcatcgtccgaaagtgtaaccgatgcaaacacaaccgtttcgccaacttcgcagttgcttagcttttgcagatcctgcgcaataatatttccatctttatcgggaatgggttctccatgaggatcgaatttcggataatccagaatttcatccattttgtcaaagaaaacagcagagtggacgtgttccagttgttctgcgatctcatgaacattttcccagccaaaattcatttttttcaccagaaacatttctgtaaggcggtgttttcttacgaccaaagaagcttcacgacgacctttatccgtgacaatcaaaggtttgtaagtttcgtaaattacccagcttttgtctgcaaatttcttcatcatattgttaacgcttggcatttttacgttcagaaatttgctcagttcgttaatcgtcacttttccctcatggtcaaccagatgaaataaagctttcagataattctcttctgttaatgtatttttcaaaatgttagatgatattctgtacaaatctaacaaaatattatgaataaattaggcactttcggcgaacttttttaattttactctatgaaattttcattcaaaaacgactattcagaaggttgtcatcccaatattttaaaggctcttgcagagcataatctcgatcagcaagccggttacggagaagacctttattctttagaagccaaagcactgataaaagagaaaataggcaatccagattctgagatctattttgtttcgggcggaacgcaggcaaatcttatcgttatttcttcggttttaagaccttatcaatgtgcagtttctgcatcaacaggacatattcttaacaatgagaccggagcaattgaagcaacgggacataaaattctgagcattgaaaaagcagacggaaaattaactccggaagacattattccggttcttgagaatcatagaaacgttccgcatcaggtaatgccaaaaatggtttacatctcgaattctacggaattgggaacgatttataccttaaaagaattggaagaactttctacattctgtaaagaaaaaggtctttatctttttatggacggtgcgagaatgggacacggtttaacctccgaaatcagcgatcttacgctggaaaaagtggctgaactgactgacgttttttatctcggaggaaccaaaaacggagctttaatcggggaagccatcgtaatcaataacagggagctgcaacaggatttcgcctttaatatcaaacagaaaggagcattacttgccaaaggaagacttttgggaattcagtttctggaactgataaaaaatgatctgtactttgatctggcaaaacacgccaattcgcaggcgatgaagatgaaaaatgcaatgaaagaaaggggagtgcagtttttatccgacacgtataccaatcagattttcccgattctgagtcatgatttaattgaaaaactatccgaaaagtttgaattttatgtctggaagaaaatcgatgaacatttttctgctgtccgactcatcacttcctggaatacagatgatgaagccgtaaacagttttatagcaattattaacaaagaattataaaaaatgcaaccgattttggttgcatttatattttactgtagagcctttgtaaccgtactgcaatcagcggttttaaggtttcttccgccttcatattttatctttttttcgttggcgtattttgttccggtttcagcatcacgttcgccgattccttccattaagccgtctttggtctgtataaaatagatgtcatttttatttcctgaaaccccttcagaagcaaattcatacgttagtttaagcgtatctcccgatttgatgccgcttaaagttccttcattactgtctttttcgctgtttttggtcgccatttttccggtgatggttcccagattatcgtcaatgcttacaaaaacggtatcttttccggtaactcccatgtaacagaatgattttgcactcaatgtatcgatcactttttctgttgtcacagcagtatccgcagaaacttcatttgcagccggagcttccggttttttgttacagttaaacaatacaaccgatagtgagcttaataaaagtaattttttcataaccttattatttatagtcaaattttttcgatcttactaaaatactaatttatgatgacaattgaattttgttgagataatgatttatcattaaattttgtataaaagtctgtttaaacttttatttaaccgcaaaagtcacaaaagatctactaaatttttatttaagctgatcattataaatgtaaaagctcacaatagtttttaaaaatctttgatttttattcttttgagtactttgattattctggaaattcgctttaacatgatcttttgtcccttttgcggttaattctgaaattagtttaaacaaattttaaattaaaaatatacagtttgatgaaatataaactaatcatttaagccttttccgttaagaatttcagggatatatttttcaattctggatattctggtttttggttgtttcgcggaggaaaaatagagtagatacgcacgctgtcttccgggagttaacgcttcaaaagctttcttaagttccggattctcatttagtttttgagcaaattcttcaggtatgttgaattcatgtgtttttttcatttcaactttcgctccggattcttcaatttccaccgcctcgaatatataatcgtttaaaacatgctctaaatcaatgatctgttgcaggtttgtgaaacgaatctgtcttgcagcctgaacattttcagtctgttgaatcaaaatattttcaggatccttcatcaaagcacctttgaaaaagaggagtgcgcaatattctttaaaaccatgaattaagaaaatattttttccttcgtatgtataacacggacagccccattttaaatcttctgtaagctcagttttcaatgcaattgttcgtaatttttcaaattctgtctgccattgttcggttttattaaaaaagaaatcaactttcggattcataatattttcatttacacctgattgaaattattttcggtttaaggtaaaatcaaatttattcatttttcgtattgtcacttaaattatttcataaatattttaagctaaatcattacagcagttttaagttgaaaatttgtttaaactaatttcagaattaaccacaaaagggacaaaagacaattttaaagtcaatttctataataatgaaagcgctcaaaagaataaaaatcaaagatttttaaagaattattgtgaactttttcatttataatgatcagctttaaataaaaatttgtcatcttttgtgacttttgcggttaataaaaagtttaaacagactttgaatcaagctgattattaacgtagattaatgcagataaatgatataaaaatgtaaaattaatcataagatagaagcgaagcttttttaaacgcatatatggtcttataaattaaatgaatagcataggtagagctttgttttagatgtctttaaaacgcctaaataactatgaataaaaggtttagcagaatttagaaagaataggataaatactctattcagttacaaataaaaaaatcctataatttatattatgttaaatagaatgtattttaagaattctctcaaattgaaaaccagaatattttcatgaccaaaattctttcagatgatcctgtttaattgtttattgaaactttcctttataatctctaacaaattcaaaactttattttctgcttcggaagttttcagcgattttaattttagaatgattcccgactatcaaaatattttttaaaggaacttatccacaactgccctaaaacttaggattctccggcaaacattcgtatttttacgttttaattttttatatgtcgattttttcagaaaatatcagacttttacgcgccaaattaggaaaaacccaacgcgaattgtctcaaaaaatacagattacagcttccagatacagttcttatgaaaacggaaaatctaaacctccggttgatgttttaattagaatttcaagaatttttaatgttagtattgatcttttgctgtcggtagatttaacaaaacatgcccttgaagatatgctgaaacttcctgataatcgtattgttctgcctgtaatggtagatcagaacggcgatgaaagcattgaaattgtttctcagaaagcttctatgggttatttaacgggttacagcgatccggattatattgaaagccttcagagaatttctcttccttttctgaaaaacggaaaatttcgtgcatttcctgcggatggagattctatgccgccctttaagaacggctcatacatcatcggaaaatatatggaaggtcttaatgatctgaaatccggtaacacctacgttttcataactttaaatgacggtattacttacaaacgtctgaaatctaaaaatgaaaattctttaacggtggccgcagataatacattttatgagccttacgaaattcctttaaatgaggtagttgaagtgtggcaatatgcaacaggaatttttcctgaggatttttaaggaaaacaaactcaatcaatttatttattctcttggttgagtttctatactactctatttaggaattttcaaatgatttccgtagaatattatgttaaattattctacggaaattattttctattttctgatcagaataattggtttttttacaaattttaatccatatttctatatcataaaaaacaccacccttttacaagagtggcatatacctaattttaaagcagaatttaaatatataaaagaatgaataaaacttttagtgataattatttcctaaattctataaatgataaagttttgtattttatacatcactaatgtatgaataattttaatagtacaaaagattttaatgatatttttatcataattttttatgggtgaatttttcctaaatagaataatttattttctattgattgattaattcatttgattgatattcaaatgtttattttttaaaatttctacatctgaagtattcatctgattgatgagaaattgccggaattatttcttttctagaataattcattaatttttattcaatatttggtgatttgtaatgattctatttccccaaaaaggttgtcagaattccattctgaattgttttagaataatttttttagacataaaaaaacttcccgtttcaggaagttgatctgtaagaaaaacaataactattctttataattgctttttcctttaaattcatgataagaatctttaatatgtttaagctgttccgagacaatttccctacttttctcactcagtgttccggtgtcaattgcattctgataagcattaatcgctgctttttcaccaaaaattacattttcaatcgtagattcttccgtatttccgatggtaaaagagtttttgatatcaatccacgttctgtggagcgttccggcaacagatggtaaatcattcgcttctcctccattttcagtgatgagatcaatgagttcgtttttcatgactttcgaaagagaattcattctcgcgtattccgatttcacgttgggatagctttcccagattttaccttccacttttgcaaagccttttattctgtcattcgtaatgtgtacaagatcattcaaaagatcgatttcctcctggtttttcatattattttattattggtgtgctgaaaactgtacaagaattataccttatagattctgcaataattcagttttaattaaaatacgacctcataaaacaaaattatattgttgtacttttgtcttatatcttcaatgattaaattattaaacttcaatgaacacccaaaatcaccacattaaagccgtctttttcgatatagacggaacattattaagctttaaaacaggaaaagtccccgattctacccaaaatgctcttcaaaagttaagagaaaaaggaataaaagttattatcgcaacaggaagatccatcaattccttgcatcatattgatcatctgaaatttgacggtttcatcacctttaacggatcgtattgcgttacagcctcaaacaagcttatttccagacatacaatagatccttccgacattaaaagtctgattcattatgccaaaaattttccgctgagctattctttaatgtatgaagataaagtagaaataaacgatgcaacacctgaagttgtgggaatgtattctcatatcaacattcctgttccgccgattcatgataaagaaaatattgatattgaaaatgtaattcaggcaaatatttttctgaaaccggaagccgaatccgaatttatgaaaaaagtaatgcccaaaagtatatcttcgagatggactcccctttttgccgatgtaaatcccggaggaataagcaaacaaacaggaatcgaaaatttctgtaaatattttgacatcgacgtttcagaaacgatgtctttcggagacggcggaaatgatatttctatgttaaaatttacaaaaatcggcatcgccatgggaaatgcgaacgacagcgtaaaagaagttgcagattacgtaaccgaagatattgacaatcatggaattgaaaaagctttaatccattttggtcttctggattaaattccgtttacacgctaatttttatgtaaaaaaattcacttttcataatttgtggtatatatttttaagctgtttttaagaaaaaggcataatatgtgtatttaccttatcaaatcacttaaaaattttagttatgagaagtttattatggttagtcgcagtcatttgtattgtggtatggcttttaggaatgttaggaatcgttccgggaatgagtacaggatatttagttcacgtattgctggttattgcaatcattgtggtactgtataatctgatatccggtcgaaagcctctcgattagaccgtcgtataaaagaaataaaagccggaaacgggaattttcatattcctgattccggcttttttattttgaatgaataatttttaccttagaattattcataatttttttaaatattacttagaagccggctttgaagcagttcctgtagctcccagtttagactttaccgttggagtaatatcttctcctccatccatataagcaacctggctgtttccttgggaaggcgcaatatcaaaaacataagccaatcctttttccttcgcaactgtcgcgatcatagaacttactttcttctgaatcggcgtgaaaagttctgtctgttttttagaaatttcctgtgccgcttttgttcttgaagtttcaatatctttacctaaagtctgcaattcggtctgagccgctgttaattctttaattacagtctctttgtttgcctcacttatcgttttttctttatcctgagccgcttttaattttgtctgataagaagtgatcatcttttcaatctcaccctgctttgttttggtgaaagtatctaatgaaccttctgctgttttagcttcgggaagattggtaaaaatatcatccgaatttacatgcccgattttttgctgcgcgcttaccatgttagacgtaaggaaaagtcctgccgctatagaaaatgttgtgataaactttttcatctttatttaaatttttatttttcgttttttaaaattcagcaaatataataaatataactatattggtagtgatatttaaaataaagttacatgaatttccatcatggtaaataacaaaacctcccgaaaagagaggttttgtatagggtaaattgatgaagtctgtattaattcgggatctgcgctttttcgtaaattaatccttccgattgcaattctttccagaaatccgaaggaattttttcatccagagcttttacattatcttccacctgttccggtttgctcgctccgggaatgatggatgcaaattcatcggctgccaaaacaaactgcaatgcagcgtgcgtaatgttggtgttgtatcttttcgcaatttcatcaattttttcacgtttttctttcattcctttcggaataacatccttataattgtaacgatctcgtccattgataaatccggaattatatcctgcaccggaaaccagcttcacactggcttttcttactgcgggaagcaatcggtcgactgcatcttcatgttccagaatagaatattgcgttgcagaaagacaaatatccggatctgcagaatccagacaatccagaatcggttcaattttattcacgcccattccccaagctttaataacgccctgatctctcagttccgataaaactttaaacgctccttctctcgcctgcttcaaaaaatacggatagcggtctcctacctgatcttcagacaaatcatgcacgtaaacaatatcaatatggctcacacgtgttctttcaaggctttcttcaatagatcttttaatggcatctgccgtgtaattgtgttcaaaatcataatgtaaaggtgctttccacatggttggcggaacttcgtcttcgggaacttccacaaataaacgcccgactttggtagacagtacaaactcatccctgttttgcccgtgaagaaaattcccgaatcgtctttcactttttgttagtccgtaccacggcgatgtatcataatatcgtattccgagatcccatgctttctgcaaaacttcataagattcgccgtctgttaattgatcaaaggctgttccgatggctactccacctaatccgagtctgtgtttttcctttaaaacatctgctttcatatggtaatatttaaaaatttggttgctctaaagggtacaaacatcgtgcagataatgtttaatcgtaaatttttatgtctaaataattgaaaccgcctatttggctttattattgaataaaatacggtaacattttcaatcgcacatacatatgaaaaaacacatcgtaatcgtaggaggaggttttgcaggagttaatcttataaaatctttggttaatgacaaaagattcagaattactttagtcgataaaaacaattatcacttttttccaccacttatttatcaggttgccacatcgtttattgaggcttcaaacatcagttatcccttcagaaagctgctttccaattataaaaatgtaaatttccacatgggaaatcttgtaaaagcagatcatgaaaataatattcttgaaaccgatacgggaaatcttcattatgattatctggttcttgcattgggaacggaatccaattttttcggaatggaaaatgtgaaaaaatgttctatccccatgaaaaccattgatgaagcactttatttgagaaattatatgcttttaacgcttgaagaagcggcaagaaataaaaatagtaaagaagctcagaaacttcagaacattgtgattgcgggaggcggaccaaccggcgtggaacttgccggaatgattgcggaaatgggaagctacatcgcagaaaaagaatatcctgaaattaaattctcactctcgaatatttatttaattgatgcactgcctactttactttcgccgatgagcaaaatggctcaggaagccgcttatgataaacttacaaaactgggcgtaaaaattattttaaatacagccgtaaaagattatgtggacggaaaagtaattttaggagacggaacaaccattgagactgaaactcttatctggacttcaggcgttatcggcagagaagttccgggaattccggaagaaagcataggtaaaggacgcagaattttggttgatgcttacaataaagttcagggaacaaaaaatatttatgctttaggagatatttcgttacagttttcggatgaaaatttcccgaaaggacatccgcaattggctcaggttgccattcagcatgccaaaaatttaggtaagaattttaaaagaattgaagaggaaaaagttcagattccttttaagtataacgataaaggaagcatggcaatcatctcaaaattcaatgcggttgtagatcttcccaatttttcctacaaaggatttacggcttggttaacttggctttttattcacattatcccgctgataagttttggaagtaaagtacgattggcattcaattggttaagattattcattaccaataatccgtctatccgtcttattttgagacctaaaaaagaaaatgcttttcacacggaattttaaatttcatgatttatttcataactttacaaaactgtagcaattcggttacagtttaaaattcccaaaagtgaatattcataataagaaaaagtttctgagctttctgaagttcaagagagactttcagaagtatggacttgaaaaagcgcgcagctacgaactcatcttacattggctaaacaacagactcagcaggaaccagtttttggttttgtcggggattattgtgggctgttcagccggtttggcaggtgtaattcttaaaactctggttcacaatattcatcattttatcacaacaaaggttcattttgaatatcaggttctgttttatattatttttccgtttctggggattgttttaacgacgagtattgttttaacgatatttaaaggacaggacagaaaaggaatcggtgcgattttatatgaaattgcacaaaattccagtattgtttcttccgttaaaatgtattcgcagattgtacagagtgccgttacggtaggacttggtggttctgcgggacttgaaagtccgattgcagtaaccggagcagccatcggttctaattttgcacagacgtaccgtctcagttacaaagaaagaacccttctgttggctgcaggagcaactgccggaattgcatccgcttttaacgccccgattgccggaattatgtttgctttcgaaattcttttaacgggtgttgtatttacagactttattcctttggttgtagccgcggtttgcggaagtttactctccagaattctcctgcaggaagatattcttttcagattctatacccgggaagcttttaattataaaaatcttccttactatcttattctgggaattgttacaggtctgtacgcaagatattttgtggtgatctcccaaaaagttgagcatttaatcaaaggactaaatatgtctcgccttagaaaagcaatgtttggcggagctgttttgtctttactttgcgtactttttccgccattattcggagaaggttatgatacggtaaaagcttttaccaatggaaatacccacaatattatccagaatagttttttcagatattttgaaataaaagattttacgattattattttcttaattctggttttattactgaaagcttttgctacttctttcaccattttcagtggtggaaacggagggaattttgcaccctcgctttttgcgggtggaacagtagggtatctttttgctgttgtctgtcagcagatcggttttacggacgttcctgtaacaaatcttgttctggtaggaatggcaggtgcaatgagcggtgtgatgtatgctcctttaacggctattttccttatcgcggaatccagttttgggtatgatctttttattcctttgatgattgtttccatcatttcttatctcattgcgaagtggttctctcctatttctccggagctgaaatctttagccgatcagggaaaaatattcaccaataaacatgataaaaatattcttttttctttaaaaacagaagaattcatcgatagatattctcaggcgattgatgaaaatgctcctgtaacggaattgtttgaactggtaaaaaacggtaataaaaatatttttgcggtagtaaatgaagataaagtattaagaggaattttaacgctggatgacatcagaccttatctatttacgagtgatgaagtttctgccacaattattcagatcatgaaagctccacctgcgattattcgtccggaagatcagcctctggaaatcctacagacttttgatgataccggagtctggaatttacctgtggtggacgcaaacaacaggttcataggatttatttccaaatcgacaatactgatgagctacagacagcttttaaaggaatattctgagtaatttttgttcagattgaattaaatttctcaccattatataaacaaaaagaccggctttcgctggtctttatatttttgaattgtttacttattaaatctctcccattacatacatattctccatggtaggaaccggacttccgccctttttttccagtgtaatggcaaaagcctgagcatttggaatgttggcaagcgcaattttgctgtctttttcttccgtatacatccctgcatctacaggttttccgtctgcaatagcccaaagctgatactgcattccttccggagcttttggtaaactttcggcgtcaagataaacatccttggttttcgtatcccagaaaaccattgctttggaatcgttatgtttttctacgcctttcagtttcaccattttcatatcaggattggaaatcatttccattttctgatttagtctctgcattgcaagattctgagcgtttttctcagtctccatttttgcaatggcttctttagtttctttctggctgttcatccagaaaatatttccgcccacgcttaccagaagcagaacagatgcggcaactgcaaaaaccttccagttgttatttccctgaattcttatttcttcctgtggttttgcagcagggatatccgcagaaaatacaggtttttcttcttcagcattctgttcctgctgaattttgttccaaatcttcgattttaaatctgcaggaggtgctaccgcttgtgctgttgcaagatcttccagtgttttctgtgcctcttcaaaagcagtttttacttctgcattgtttttcatcacacactcnnnnnnnnnnnnnnnnnnnnnnnnnnnnnnnnnnnnnnnnnnnnnnnnnnnnnnnnnnnnnnnnnnnnnnnnnnnnnnnnnnnnnnnnnnnnnnnnnnnnattcctcattttagttttaaccgttcccagcggtatcttcagtttttcggatatttcgttttgtgtatatccctgataatacgcgagatcgataagttcctttttgtctttctccagactttcaagcacactggcaaaaccgatataatcggaagaatcattagtcgttgaaagctctgtagaatcatatacgaaatctggaagcgattggttttttaactggttctgaaatccttttgattttaaataatcgatcgctgtattccttgcaatattaatcatccaggtataaaatctacctttagaaacatcatattgatggatagaattccatattttaacaaaaacgtcctgaataatctcttctgtatattctttggactgaacaattcgaagaatcaccccgtacaatgcaccggaatagtgatcatacagatgatgaaaacctgtttcgtttttttcctttagtaaaacgattagctgctcttcagaatattttgttttaatagtaaattattttacccatcaaaagtaacaataatattaatgataaccaaattttaaaaactcttttaaatctttattaaaacagagtatatattaacagattgtgaacgatattcatctatttcaaaacaaatgtgaaatttaatagcctgtttttcaattacttgtgatttttattcaaatttttaaatccaaaataaaaccgagttcgtaaatgattttaacaacagacaaatcgaataatttatcattaaaaattaaaaaaaatgaatactagatcaaaaatcgcagttttaggaatggtagctttatcattcgctttcagtggaaacgctacagcacagacaatgaaggaaaaaacagtaatggtaggaggagcgccaatgtatccgtctaaaaacattattgagaacgcagtaaattctaaagatcacaaaacactggtagctgctgtaaaagctgcaggtcttgtagaaacgttacagggagcaggtccgtttactgtttttgcacctacggatgcagcatttgccaaacttccgaaaggaacagtagaaaattttgtgaagcctgaaaataaagaaatgcttacaaaaattcttacgtatcatgttttaccgggaaaatacagctctaaacaggtttgggcagcagtaaaagccggaaacggaaaagcaatgatgaaaacagtggaaggtgaagaacttactttctgggcaaaaggtaaaaatctttatgtaagagatgctaaaggaaacgatgcaaaagtaactattgcagacgttaaccagtctaacggtgtaattcatgttatagatacggtgttaatgccataataattttaagtgtgagaaacagcataatatttatgctgttttctttcaactttgtccaaaacacattaaaatatataaacctctacactaaaaaataatattatgaaaaaaactattaatgtgtctaaccagggagtaactctggatacaggcagaagaaattttttgaaactgagcggtgtaggtcttgctcttgcaggtcttaccatgatcggttgtgatgatgataatttcgatatggttgaaaataacgttttcgaccttggaaaaggtgatgtgggtgtattgaactatgcttatgcacttgaacaattggaagcagatttctataccaaagtggttaataatttctattccggaatctcaaatgctgaaaaacagctttttacagatctttatcatcatgaagtaatccacagagacttctttaaggtagcgatcagcggagcaacatccaatgtattgcctactctggaatttcagtacccgaatgtgaattttaacgacagaaattctgtactggctactgcaaaagcattggaagatacaggagttgcagcgtacaacggagcaggaaaatacattaccaatgcagattatctggtaattgcaggtaaaattgtttccgtggaggcaagacatgcttcagcaatcagaaaccttatcaaccccggaaccgcggctttctcaggagatgatgtgattgatgccaatggattggatcttgcaaaagaaccaaaagatgtcgtatcggcagcaggaggatttttcaaaacacctttcacttggaaagaacagggaatcggttaattattcacttcaaaaaattacattatgaatattcttaaattactagataagctttctgatgataaattcttcactacagaaacatcgagattagaaacacttaccaatatttcatctttcgggaaaaaagcggctattgctgcagttccttttggattaggagctttaatgacgactcctgcaaaagctgaaaccacagatactacaaaaaatgcaacattctttaaaagtgctttaacggatgccttgcaattggcgttggttttagaatatcttgaaaatgaatattatgcattaggactggcggcttcgtctttgattccgagtgcagacaaagtggtatttatgcagattgcaaaacatgaatctgcacacgtaacgtttttgaaaaatactttaacttctttaggagtaactccgggcgctaaaccgaccttcgattttacggcgaacggtaatttttcaccttttacagattacaatcagttccttgttttagctcaggcatttgaagataccggagtaagagcatacaaaggacaggcaggaaatgtaatgtctaataaaacagttcttcaggctgcattgcagattcactctgtagaagcaagacacgcttcacaggtaagaagaatgagagccaacaaaggatggatagaattggcagacggaggaaatatgccttctgcaaccaatcctgtttacgctggagaaggcaatacaaatcaggcgggctttaataccgcaacagcttttggagctgctgcaggttctgctgcctatgacgagattttaagtggaagtgatgcccaggcaattgcatcattattcattgtctgaggggtttttaccttaaatttttagctgtttagtccctttccgagtttttcggaaagggttttttttaaaatattaaataactgccagttattttttaagccaagtctggttttctttattctcagagcgttttctgccattatcaatattataagcaaagccgactcctaaagtctgttttagctgtgttttagcaatctgattatgatcgtacagcaagtccagcgttacattcgtggaaataaatttattaattttcatatttagaattccgctgtatgctaaaacaagtctttcaggatgatccagataattagagaaaacagaacctgtattcattaaagtaatgttctccatgatctttagtttatacatagctgttcccaaaaaaccgaattgaaacagagaagaatcaccgtcattctttaatccataaattcccttgtattgaagttctttatctaaaacaaaggtccatcttgcattggcaggacgtattgttgccgtaaaattgtcattaggtctgtaagtaactccggctcccatattgagataacccggagccatgaaatttgaaattttcgccgcatcaggattatttccgtctgcataacccggtgcaaactgtgtctgtaaactggctcctgcggaaatataccagttttttgcaaattctcttccataattagtggaaagattaattacatcctgagtttttctcgttcctactcctttcgtattattttgtccgtatccgagaataataatattttcccagagatcttttcctttttcgtacgtaagattatagtttactccggcaagccaacccacattattggctcctcctccaacccagttggaaaaagctgcctgattgagcattaaggtattctgtccctgaatgctccatacttttgctgtatccgaaacagcagcttcgcttttttcctgagcgcagagatgaatccctaacaaaacgataagtggaagtaattttcttttcataagtttatattttggtttaaaattaaaaataaaacttactgatttgttaaaaattttgaacttaaaagaatttatgtgaaattattttacacttagtcaatataaagtcgggaattaaaaagggtaagaggtaaatgagaagatatgatcagtcattgtatttaattcaaagatagcgttcctacggaacgccgagtatctcgcgaatatgatttctacacaaataaagctccatagagtctttacataggcttgaaacaaattaaaaaaagattataaagaaataaaaaatcacagttttaagccaatcatttttatctattaacatcatgaaaaaaatatgttattttttttctgaaaatattaggttggaaaatcattttttgattatatttgtgaatcgaaataattttttttcatcatttgtgtttttttaggctcctttctaaggagtcttttttgtttttattaggtaacccgctttctattgcttgaagccacccattcgtcttttttacatttgctgcagtttccagccatacctttgtgtttttcttccgtatgtccgcagaatgtgcaggaataaaatccttcatgaacaatagttttcacaggatgatccagagaatccggcataatcggaagtccgtactttactctttcatcttcgaaataaaacacactgatttctccggaaatttcttcaatggcactttcgatctgtcccaactgagaaattccttttaaccttaattcagcaaaaaattcatcactgccgagattttcttttttaaaattttcaatggaaaattctccgttttcgatcagacagatggattttccttcaataagctgttcgatttttttattttttgcgataaaataggttacaatggtgtatagaagaataataaccgcaaatacgataaaggatgaaacaattccgacatctttattaaacatcggatctcccgccgcagaacccagtccgataatcacgacaagttcgaaaatcgaaagctgcttcactccccttttccctaaaactcttaatccgatgatgatcgtaatgaacataatggcagtacggagaataatttccagaataaaagaccactcttcgtgccccatcagaagttctttccagtctaattctaaaagaaatatggataacatataaaatttatgaatcaaggttcaaaaaatacgccaagcaaaagaaaaatgtagtatgaacgtttgttctgaaaataaaaaccgtctctgttgaaacggtttttctcttatttttaaatttgctcattacatgaagcggagcgaaagagaagagacttaaacacgtaattcgctttcttcaccgtcattcagcacaaaacatctttcttccaaaccattctcctgaattttttctttaatgaattttctgtcttctttagaatgacttacagtttcaagatgcgttacccagacttttgaattcggcgcagtctcacagacttttaaaatatcatgactcgtcatcacaatcggatctcccactacaaaagttgctgctcctcccgcaacaactatttgttccggctgatgttttttaattgcctgttccacttcttcacaccagatactgtcacttgcaatataaacagactgttcagtatttttaaagacaaacccatgaactacacccatctgtccttcaatttcccctgttccgtgatgtccgttcgttaaagaaatttcaatatttttaaactgtactgtatcattgaaagcaataacatttttaaatccagcctcagaaatctgttcagaaatgatttcaggacaaatgatgggtacatttttatctaaaagttcaatcgctttcgggtcccaatgatccggatgaagatgtgtaacggctaccgcatcaatcgtttttaatttttcctgaagttcttcctcagtgaaaggtaaatcaactaacggattcaataattcattgtctaccatcggaaattgtcccaaagaaccttttacacctaacatcggatcaattaaaatgttcagtccatcaatatttaaaagcagcgttgcatttcgccataattgtaatttcattttctttaattttgtatctgcaaagctattatttaagtgaaattaaataatcgatggttaccaaaaggtgcactatatacaattttgtaacgtatgacatttgaagaatttaaaaactgcggactgagaaaaacgctggacatgatctccggcaagtggaaaccgctaattttatcgaatctttttgaggaaaaagaagtccgttttgtggaattatggcgaaaaatgcctaaagtttcaaaaaaagttctggcagaacagctcaaacaaatggaggaagatcatatcattcaacgggttgaagtctataattttcctccggaagtatattataaattaacggaaagagccaaaaagctcggtccgatccttgatgaacttcaccaatggggaaacggacatcaaagatcttaaaatcaattaattactgaagtcatccaaaacttcaagaatattccgatacacaaaatccagttcttcaggcgtaatgcagtaaggcggaacgagatacatcacatttcccaaaggacgcataatgattcctctttttaaaaattcatgatacaaaaccttcccgatttcgttaaaataggatgttttttcatcatttttaatttcccaggcgataatcgttccggtctgtcttacattttcaactttcggatgattttttaaaacctgagaaaaattaaaatgtttctgactgattgcattgattttttccagcgtttcttctttcaaaagcaattccatacttgccaaagccgctgtacaggctaaaggattcgccgtgaaagaatgaccatgaaacaaggttttgtatttgtcatccgacaaaaacgcttcgaaaatctgttgtgaagaagttgtaattcccatcggcattgttccgcctgttaatccctttgaaaaacacatgatatccggtttttccgaaagataatttgccgcaaaaagctttccggttcttccgaaacctgtaaaaacttcgtcctgaatcattaaaatttcactttctctgcaaaatttcatcagttctgataaattttcagctttgtgcattaacattcccgcagctccctgaatcaaaggttcgtaaatgaaacaagcaatttcttcagcatgattttttatgataatttttaaatcttcaatattttcagaagtcggcggatcaataaagatcacttcaaaaagcatttccccgaaaggtttcgtccagacacttcttccgctcaccgacatcgctccgaaagtatcaccatgataagcctctttaaaagccagaattttcgttttttcttttccttgattatgccagaactgaatacacatcttcaaagccacttccaccgcagtagaaccgttatccgaataaaaaaccttctcttgattttcaggcagcagtttcagtaaattttcagaaagctgaatggctggttcgtgtgtaaatccagcaaaaataacctgttccagcgtattcagctgctcagaaactctttgtgcaatgtacggattcgcgtgaccgtgaagcgtaacccaccacgaagctactgcatcgatgtatttttttccgtcttcatcgtaaagataaattccgcttcctttcacgatcgggattgcatcttccgctgttttcatctgcgtgtaaggatgccagttgacggctctgtcgcgctcttgtaaattcataaataattggtcgtaatgtttaattttatcaatggtgaattgtcaattgtcaagtttaaacgcaaagactttatttctaaatttatattttaagctaagcaaagtaaagcagatttcatctgccattaagcaaccgcttcattgtctccgacggaaatttctttgctttactcattattttttctttgcgtttaatcattctttatatttatagataagtactaaaaattcaatgctgaattgtcaatcgtcaagttcaaacgcaaagactttatttctaaattgatatttaagttaagcaaagtcgagcagatttcatctgccattaagcgaacgcttcatcatccgtctctgacggaaatttctttgctttacttatgataaaaacaaaacattttctttgcgtttaatcattctttactttaatagataagtactgaaaactatgaataaaattcaatacagaattgtcaatcgcaagttgtaaacgcaaagactctatttctaaattaatattttaagctaagcaaagtaaagcagatttcatctgcctttaagcgaacgcttcatcatctgtctctgagggaaatttctattacccaaacaaaacactttctttacgtttaatcattctttacattaagtactaaaaactatgaatagaattcaatgctgaattgtcaatcataaattgtaaacgcaaagattctatttctaaattaatattttaagctaagcaaagtaaagcagatttcatctgccattaagcgaacgcttcatcatctgtctctgacggagatttctttcatttacttatgataaaaacaaaacattttctttgcgtttaatcgttctttatattaatagatagctattgaaaattcaatgctgaattgtcaatcgtcaagtttaaacgcaaagactttatttctaaattaatatttaagctaagcaaagtaaagcagattttatctgcctttaagcgaacgcttcatcatccgtctctgacggaaatttcttctttacttattattaaaacataatatttactttatcaatgctggattgtcaatcgtgaattgttattttcacactccaaaaaattgactattgaccattcagtattcacttttcagcattcacttttcagcacatcgttttctctttcatcatcggctttaatcccaaagtctgcaacatctgcatatcctcagaaacacccggatttggcgttaccagaagcgtttctctttcccctgtaaagatcgagttggctcccgccatgaaacaccatccctgctcaaattcagtcatttcaattcttcctgcgcttaaacgaaccattgatgaaggcattacaattcttgctgtggcgatcattcttaccatttcccaggtattcgttttttcgttatcctgaagcggcgttccttccactcttgccaatgcattgatcgggacagattccggatgtttcggcattgttgccaatgttaaaagcattgaaatcctatcttttggcgtttctcccaatccgatgattcctcccgaacaaaccgtaattccggcttttcttacattattaatcgtattgattctgttgtcgaacgttcttgtggaaataatttcatcgtaatattcctcggaagtatccagattgtgattgtatgcatacaaacctgcttcctgaagccgttttgcctgatcttccgttaacattcccaacgtacagcacacttccaatcccagttcatttaccccttttaccatatcaataacacggtcaaaatcacggttgtcacgcacttctctccacgctgcagccatacagaaacgcgatgagccgccttcttttgctttttttgcgtgttcaatgaccgtttctgtcggcagtaaagcctgaactttaatattcgtatgataacgcgctgcctgtccgcaatacgaacagtcttccggacagcctcctgttttaattgaaagcaatgttgacatctgaacttcttcaggattatgccactcacgatgaaccgttgcagctttataaacaagttccagaagcggaagattgtaaatttcttctatttcttccttcgtccagtcgtttcttagttgattcttattcattattctattttttctaattgtagtgcaatattttctatactttcttttgttatattttcaaggtcaggaattcttataatttcagtttccggtggaatattttcacaaataactctttctgtgtccggtggaaaatttccgttgagaattaaatagttcagtttaattttcttttggtttaaaactaaaacagataacaatgtatgattgatacagcctaaataattcttcacaaccaaagcggcgggaacgttcagcttttcaattaaatcaataataaattcattatcattcagcggaaccatcaatcctcccgctccttctatgattaaatgattctgtgttttcggaatttggaattcattcaaatcaatcagaattccttcttcccttgccgattgatgcggtgatgcggccaatttaaaacgatatctttccgggtggcaaaccgtatgttctcccacccagtttttaattttcatcgtgtcggaatattccagatctccggactgaacaggtttccaatactctgcctcaaaatatttggttaaaaccgccgaacaaaccgttttcccgacttctgtcccgattcctgtgacgaagagtgttttctgattcatattttgcatttctaattcaatgttcattatttcaatgttttcttgtcatttcgacgaaggagaaatctatccttttttaataataaaattgtttaaactatttcaggattaaccacaaaagtcacaaaagacagtattaaagtgaatttctataataattaaagtgctcaaaagaataaaaatcaaagatttttaaaaactattgttacctttttgatttgtaatgatcaactttaaataaaagtttagctcatcttttgtgacttttgcggttaaataaaagtttaaacagacttaatcaacagattcatcactccgctattggatggcatttacgttttaaacaaactctttgataatccccgttaacttcaaaatttcctcttctgtattaaaactgtgcagacaaatcctcagtctttccgttccttcttttaccgttggactgaaaaccgcatacgttaacaatccactttccgataaaacattctgtacaattttcaactgacgattatccggaataatgattgcctgaatcggactgttttcagatgacggagtagctaaattctgctcacgaaaaattttaatgttttcctgaagttgaatggataatctaccgtttgcttttaaaaattcatatccgctaaaaatactcatccatagaaaatcgtgcgctgaagtcgtatagataaaaggtgatgcaaaattgatgagataagatctaattaaatcattcgttaaaatcgccgcaccatgcgttcccaaagcttttccataggttacaaccgttgctgaaacttttttctgcagcttcaactcactcaccaagccttttccaaaaacaccgaaagcgtgggcttcatccacaattaactgagcattgtatttcgctgtgatttctgcaatttctttcaaaggagcaatatctccgtccatcgaatacaggctttcaacagcaacataacaaagtccggtttgctttttcagaatcctttctaaatcgtcaacatcattatgcttgaatttcagttttttagcattcgacatcctacatgcatcatgaacggaacgatgaattttttcatccacaattatgatatcatgacgggttagaagcgttgaaaatagaaccagattcgcattatatcccgaagaaaaaagtaaagccgattcgtactgatgttctttggctatactttcttctgtttcagcaacagttaaactatttccgctgatcagcctggaaccagtacttcctttcagtaattccggattttcgttgattttttttaataaaatctgccgaaaattttgatttcccgccaatcccaaataatcgttggaataaaaatccactccttctttttgagattttaaaacccttaaggttccgctttcttttcttttgtctaaggcttcctgaaaatgacgaaaattattcagcataatttacctgtaaaatctcttttgaaatggcatcaatccattggttatgaagatctttttcaatttctaaaacaatttctgcatgaattttccagtcttccgaaaaatcgtccaactgattaatcatttcctccaaatgtccttcttcctccaaaataattgattttaccataatttttgaggtatgttttgtcagaatttcctgataaacaggatataattcatcggcacgaacttcaatagcatatgttacaaacagatatgccgcatattttaattcttctttactgagattgaaattttgctgaagatacttacaggctttaatgtcgagagaatgaagatattgtctcgttgccgttgcggccaaaagttcattgctattgtacgttttgcacatttcaggatcaactttcaggatctgctttttaagataataagcgtggcgatgttcttccgcagcgtgttttagctgtattaaactcactttagtcggatgttcacaagctgaaatttttctggctcctgcattttccataaaggaaagcgtattcagccattttgcgtgcgtctcattttgctgaacaattttttctaaaagactgtataattccattcttttttgttttggttcaaaagtagtatattgccggatggttgtatggtgccagtttttagattatggatagtccggttaaaattccttatcagagtttcataaaaatcaatagaaattccgaagtttctatttacatgcagatttccaatcagcttattaatgccattcaacgtggttttttgccattcggaaccaaacttccgggaacaagaatgcttagcgaaatgctgaatgttcacagaaataccattgtttctgtctacgaagagctgttttctcagggatgggtggaaagtcttcccaacaaaggaacttttatcatcggaaaagacgagtatcagtttttggaatcgaaaaatttacaaaaaattcagctcgaaaattatccgaaatcaacaggatttaccttcaaaacatccaatattttagataatccttttgaatattccaattgtgaatacatttttaatgacggaattcccgacatccgcttaactcagatcgatcagcattccagaatttacagttcaattttgaaaagaaaggcgcataaaatcggacagtacaatcaggatggaagtgaattttttaaagaaaatctttcaaaatatttaaatttatccagaggactgcctatttctaaaaataaccttctcattacaagaagcacagaaatgagcatttatattgcctcggaaattcttttatccgaaggggatattgttttagttgcagaactgagctatttctcggtgaacatgatttttcaaaaagcaggggtgaaaataaaatcagtctccattgacaatgacggaattaacacggaagaagtcaggaaaatctgtcaacagcagaaagtgagaatgctgtatcttacgccgcatcatcattatcctacaactgttacgttgagcgcacaacgcagattagaactgctgaatctttcgaatgaatttggttttatcattttagaagacgattacgattacgattttcattacgacaaaagtccacttcttccgcttgcaagcgcagatacgaacggaatggttatctacatcggttctttcggaaaatctctggctcccggtttccggacaggatttattgtcgctcccgaaaatctgatgtctgaaatgagaaaacatctgggaattatcgacagacagggtgatattttaatggagcacgttttaggagaaatgattgccgaaggagaaattaaccgttacctgaaaaaatctttaaaaatttatcaggaaagaagagattatttcattcatctcattcaggaaagtttaggaaattatatacaattcgaaaaaccgtctggaggacttgcggtttgggcagaatggaaaattcccatcaatttaatgcagctttctaaaaactgtgcgcaggataatttatttattcctaaaaccttactttatcagaataaaaatctagccgccatgcgtttaggatttggaaacctgaatactacagaaatggaaaaatcggttgaaatagtaacggatcatgtgaaaaagatgcttcattaaagatttttaaatatattggttagatttttgaatataaaaaataacaaaattgcaccattgaaacttatcacattcacaaataaaggcatttattgcccgcagggaaaattttatattgatccttggcgatctgttgatttggcggtcattacgcacggacacgccgatcacgcacgttggggaatgaagaaatacttgtgtcatcattttaccaaacctattctgcacaaaagaatcagcgaagatcttgaagttcagagtgtggaatatggcgaaatcatcaatatcaacggcgtaaaagtttcacttcatcctgctggtcatattatcggctccgcgcagatccggctggaatacaaaggctatgtaagcgtggtttcaggagattataaagttcaggatgatggattaagtacgcctttcgaactggtaaaatgcaatgaattcgttaccgaaagcactttcggactgccgatttacaactggctggaagttccggatctgaataaaaaactccagaactgggttctcagaaatcaggaaaatcaaaaaacttctgttttcataggttattctttgggaaaagcacaacgcgtaatgaaggcagtggaaggaatgggaaaaatccacgtccactactcgatcggaaaactgaataaagcctttgaagaagtgggaatcgtactcccagattacgaaattcccgatttcagggaaagtatcaagcacgttgcaggagatattgtgattgttccgcctgctttgctggattccaatgtgattaaaaaaattccggatgccgcaacagcaatttgttccggatggatgcaggttcgcggtgcaagacgatggcggagtgccgatgcaggttttccgatgagcgaccacgccgactggaaaggtttgttacaggctataaaagccactgaagctgaaatcgttcacgttacgcacggtcaaacagaagttttttctaaatatttgaatgaaatcgggattaaatctgatgtggtggaaacgctttacggcgatgatgatgagaaagaaaaagagaaagaaattattaaagactaataattatagcgatgcaggaaagctccgtaggagcttactgttaatagaaaaatttaaggcataataaagcggagctccgtaggagcgacctgttaatagcccatcataattaacgccgaattgcaagcagcccggcttgaacggagctctttttgtggagcaaagcggaacaaaaaagcgggagtggaagacggattaagctgcccaaaaaattgttaacatacatttaaaaaacgccaattaaaatttatgagacatttcgcagaactgatcaatgctctcgaaagcaccaataaaaccaatgcaaaaatcgatgccatcatcgattacctggaacgtgcgcctgatgaagataaagtctggtttattgctttgtttacaggcaaaagatccaagcggaatgtaaacaccaactatatgaaagaatgggctttggaaatcacagaattaccgttctggctgtttcaggaaagctactcttcagtcggagatctgggcgaaaccatttccctgattcttccaccaccaacggaaaaaatcgaacgttctttgtcggattggatgaatgatatcatcaacttaaaaacaaaaaccgacgctgaaaaaaaagaatttgtcctcaattcgtggaatggcttggattatacggaacggctgattttcaataaattattgggtggaagtttcagaatcggggtttcagataaaacactgattaatgctctgacgaaattttccggacaggaatccagcgcattgatgcacagtttaatgggaaaatggcagccaacagaagcttcatttcaggaattgatttcggctgaaaatgtgaatcccgataattcaaaaccctatcctttttgtctggcttatccattggaaaaagatttggaagaactcggaaaacccgatgaatggctgattgaatacaaatgggacggaatccgcggacagattatcaagcggaatgatgaagtttttatctggtcgagaggagaagaactggtgacggaacagtttcccgaaatcgcagaaaccgttcagcaaatgagcggaaattttgtaattgacggcgaaattctcgcggtaaaagacgataaagttttaaattttaacgaattacaaaaacgtctcaatcgaaagacattaacaaagaaaatgctttccgaaatcccgattgaagtctttgcgtatgatcttttggaactggaaggaaatgatttgcgtgataaacccatctccgcaagacgtgcaatgctggaagaattattattgaatgaaaatcctgaaaatatcagaatttccgaatcaatagaatttgaaaactgggaagaattgaaccagataagggaaaattccagagacatcaacagtgaaggtttgatgctgaaacaaaagaattcacattatcattccggacgaaaaaaaggcgactggtggaaatggaaaataagtcctttaaccattgatgccgttctgatttacgcccaaaaaggaagcggaagacgaagcgcatattacaccgattatacttttgccgtgaaaaacgaagataaattggtcaccatcgccaaagcctattccggattaacggataaggaaattatggaagtcagtaaatttgtcaataagaatgctattgaaaaattcgggcccgttcgaacagtaaaagctgaattggtttttgaaattgcttttgaaggaattggttttagcaaccgtcataaaagcggtgttgcactccgttttccaagaattttacgatggcggaaagataaaacggtagatgaaattgatgatctggaagaaataaaaaaattgatacagtaattataaacgctaagatcgcaaggattttatttaaaactttgaaaacatatttcgttcgcaaaggcgcttcactcagccacggcttgtgctatcatttgctgaacgaagtgccttcgcgaacgaaaatataaagaattagaaatcaaaaaaatctttgcgctcattgcgttaaaacaaaaacatcatttaaaatttgagcaacttcgaaaataccaacggcttcaaagtcattcagcagtggatggcggataaaggcaattccccttttaaatttcaggtcgatacttggcagaaattcgagaacggctacagcggaatggtaattgctccgaccggtttcggaaaaacattttctgtttttttagcattgttaacccattttttaaaccatcctgaaaaatatggaaaaggtttaaaaatgatctggatcacgccgctccgttctttatccaaagacattgccaaagcgatgcaggaggccattgatgaaattggattggattggacagttggcgtaagaaacggcgacaccgatccgagagtacggcagcaacaggtaaaaaatatgcctgaaattcttgtggtgacaccggaaagcttacatcttcttctcgggcagaaaaatcatgaacgtttttttaaggaaataaaaaccatcgttgttgatgaatggcacgaattgctcggttcgaaacgcggggttatggtggaattaggcatttcccagcttacaaaatatgctcctaaaatgaaaatttggggaattacggcaaccatcggaaatctggatgaagcgatggatgttttaattccgtatgacattaaaaaaacaaaaattaccgccaaagaacagaagaaaattgatattcttcccgtttttccggatgaagtggaaattcttccgtgggcgggacatttaggggcaaaattagccgataaaattgttcccataatcttagaatcaaaatcgaccattgtttttacaaatacgcgaagccaaagtgaaatgtggtaccagttgttgcttgaagcctatcctgattttgcaggacagatcgccattcatcacagttcaattgatgctcatttgagaatctggattgaggaaaatctaagttccggaaagttaaaagccgtcgtttcaacctcttctctggatttgggaattgatttcaagccggtcgacaccgttattcagattggttctgcaaaaggcgttgcgagatttttgcagcgtgcaggacgaagcggtcactcccctttcgaaacttcaaaaatttactgtgttccgacgcattccttggaactgattgaagttgccgctttaaaggaagctgtaaaacagaaagtgattgagccgagagatccgcaggttctgtgttttgatgttttggttcagtttttaatgactttggcagtcggtgacggattttatccgcaggaattgtatgaaagaattaaaaaagtatatgcttttcaggaaatgatggatgaagaatggaaaagcatcctcgattttcttaccatcggcggaagtgtactgaaaagctatgaagaatttcataaaatcgtgattcaggaagatgatttgtacaaagtgacatcccgaaaaattgcgatgcttcaccggatgaatatgggtgttattgtaagcgatgccatgctgaaagtgaaattcatttccggcggttatatcggaatggtggaagaatatttcatttcaaaacttaaaaaagacgaaaaatttattttggcgggaagagttctggaagtcgcgatgactaaagatatgacggtttttgtccgcgctgccaaaggaaaagcctttgcaccgagttatctgggaggaagactgcctttaagctcaaatttaggtcagtttttaagagaaaagttatccggagcgctcaatccgaaagcttcagaaaaagaactgaaatttctgcatcctttgctgatgaatcaggaagaacgttctcatatcccaaaagaggacgaatttctggtagagctcattaaaaaccgtgaaggatatcatctgtttatgtatccgtttgaaggtcggcttgttcacgaagtgatgtcggctttaattgcctacagaatctcaaaactggctcccatttccttttcaatggcgatgaatgattatggttttgaactgttcagcgacaaagaaattccgctgaatgacgaaaatctccataaaattctgagcagggaaaatctgatgacagatgtaatttccagcatcaattcagcagaaatggcaagaagaaaattccgtgacattgcggtcatttcaggaatggtgatccagaattatgcaggaaaacaacgttcaaacaaatctctgcaaagttcggcaggactaattttcaaagttctggaagattacgatccgaaccatttccttgttagacaagcttatacagaagtttttaacgcacaattgcaggaacagcgactggtggaagcatttaaacggattgaaaaatcaaaaataatcctgaaatttgccaatacttttaccccgctgagtttcccgataaaagtggacagtctgcggcagacgctttccagcgaaggactggatgcgagaattcagaaactgattcagcaggcgaaaaaagggaaataatttttatctgggcagcttaatccgccctccgttcccgcttttttgttccgcgatgctgcacaaaaagagctccactcaggtcgggctgcgaattagtcatcagaacaaaagttagcggaaatcagaaaacaattatgaaaatagtaacaaaaaatatccatattctggacgaagtctttacattaaccaatcagagagcattattctggaaaaaagaaaaagccttgatcctttcggatcttcacattggaaaaaccgcccatttccgcaaaaacggaattgcactttccgatcatatttttgaaaatgatctgcagcgattatccgttttaattgaatattttcagccggaaaaatttatcgttgtcggcgatctgcttcacgcaggagacaattccggagtagataaattctgtgaatggaaaaatgaatttcccaaccttgaatttcatcttgtagaaggcaatcacgacagaatttcaaagaaactcgaagccaaactctgccttaatttcagggacgaaaccttaagtattgatgattttttattcgtccacgattttcagaaaaagaatgaaaaatttcagattacaggacacattcatcccggatttgtcattaattctgtggtaaaaaaaatcaaactgccctgttttgttgttacggaaaatcaattattgcttcccgctttcagtgagtttacaggtttagacacaaaaaatcttcctaaaaaaggaagattctatgtatttacagatgctgaaatttatgagatttaagagaaaatttaaataaaatcagtttaaaattttcttcatcatcagatccgtctgttcatcatttcccaaacggaaaatatgcttgtcaaattcttcaaaaccattcttcttgtaaaaattgacggcacgtttattctcttcccaaactcccagccaaatgtattttttgtcttttaaaaaggcaatatccaaagctttgctgtacaaaagttgccctacttttttaccgtgatgcgaacttttcacataaattctttcaatctccacagacgattcgtcctgaagttcggtttgtgcatttccaaaattaattttcaggtaacctactgcattttcgtcatcataagcgatataaaactcagaatgagagttatttaattcttttgtcagtttttcttccgcaaaactttcggtaagatacttctgaatctgctcttctgaattatgaggtgcaaaagtttcataaaaggtctcttttcctattttctgaatgatttcaagatcactgagagaagcttttttaatgataattgcctccatttttacgaaaacagaattttattaaacgcttccgaagccagatgaacctgaaccgcccaatcgtctgcggcatcgcttcctgcatcatcggaaatatatttcaggcacaggaaaggaatttcttccttcatcgcgatcaaagccaaaggataagcttccatatccacaatattataaactgtttccgaatgattcatctcaaaactgtcgccgcttccgcagattccttccggaagatcgtgtcttttcaaaccatattccagaaccggcggaattcctgaaagcggggtttcgtacaggctaaaaccaagtcctctcacatccatatcgcgctggatgaattttgtacagcacacaacatcacctttatggaaacttttgcttcctgcagatcccagattaacaatcagtttcggtcggttacggtagatttcttttgttaattccatcgcggcatttacttttccgatgcctgtaatcagtttatttttatcattaaatacttttcctgcttcagaatccaaagcaaaaacaaaaagagtgtcttcaaccgaaaactgaagttcgtcgtttatttttatcatttaattaagcttaaatttcacaactgtctgcatcacacgaagctccattgtctgaaagtttttgcagtggagttaccgtttcatcgtaagtctgctgcaatgcactggcaaaaagctctacaggctgcgctccggaaaccgcatattttccgttcagtacaaaaaacggaacgccggaaacgccattgtttctcgcttctgtaatgtctctgctaatttcttgattatattcttcggaagctaaaactttctgagcttcttcctgatcaatccccaaagaaccggcaagattaaccaatgtttccacatctccaacatttttaccatctacaaaatgagcgatgaaaagggcttcttccatttcgtttgccttattgtatttttttgctaaatgcaataatttatgagcggaaaatgtattggtaatcaatgctttttcgaaattaaaatcaattccggctccgcttcccatctgttttacctgcgcgatcatctgctgcgcctgagcttcagggaaacctttcttttctttaaaatattcggaagttgtctttgtttctttcgggtctaaagtaggatctaactgaaaactcttccactccacttctacctgatctttaaaaggcagattttctaatgctttttcaaaattgttttttcctatataacagaacggacacatcacatccgaccagatttctactttcatttttagtatattaaaaattttattttgtgatttaaaacagcagtacaaaaatactcaatttaccgctaaaaatttccctgcatttattggttttgctgatgaaaggtattgacggaaatatttcattgtttaataaataatcaggaaatttgctccatgaaaatcataccactgaaagaaggaaatttttctaccaataaaaccaaagattttacgcttttaactgaagaaaataaagacacggttaaagggatcaagatgtcggttactccttttttaatcattacagaaaaagatagtattcttctggatgcaggaatcggatggaaaaatgaagatggaaaaacggtgatttcagaaattctggaaagggaaaatattcatcctgatcagattaccaaagttttgctttctcatcttcataaagaccatattgaaaccacaattaccagaactgaaaatggatttgaatctacttttccgaatgccgaaatctatatccagaaacgggaactggcttttgccttggaaaaccggggaaattattcttttgattttgataccctcgaaaaactgatcgagctcgaaaatattgtctggatggatgaagacagaggaaatattacggacgaaatttcgtttgaagttgttggaggccacactccgtttatgcaggttttctggattaaagaaggtaatgaaacggttttttacggagcagacaatcttcctcaacagtcttatttaaaatatcatcttgcctacaaaagtgatttcgacggaaaaagagcgatgaatttaagaataaaatgggaaaaagaagctgttgaaaatcattggaaagttttactgtaccacgatctggatactgctgttctggaattttaaacaaaaaaaatggtttaaagatcattaaaccatttataaatatccatatcggaagctatgctcagttttttccgaagtctgtttttccgattctgtattgcctttggagttacaaacgtgtaggttgcaacttccttcgttgttaaattaagctttaaataaatacaaaatacaagctctgaatttttaaggtcgggctggattgcagatagtttactgaaaaaatccggctccaccaatctgaatttactcagcagacgaggagaattttcttttgccagtgctaaaatttcgtcctgtacaaaaatcttttggtttaaatcttctaaattgaattcagttttttcgtttttcataattttctcatctcttctaatttctgaggcttttccgacaagcttcagcataaatctcttcgttctcttacctcagtttttgtgcgatgaagctaattttctgaggtgtttttaagtcttgaataatctttactgttccaataacatctttttggttactttttttctttacttattgtatttatgcttaaaataatatcgtaaaaacaacgattaagattttaaccaaagacaaagaaagaaaaaatgattaaaattttacataataaaaataccacatacataccacgttatttctgctgttgccttatttttcgggatctttttctgatatttcaattatctgagaacaaatctagaagtttttgtcatctttttttatgattacgatcaatacaaatgaaatatgaggttcattgtcaccaataccattctaaagcaataaaaaatatcgcttcagggacgtatgaaaaaaaagcaaagtataaaatggaattttaaaatgtacttaatcccagattcagttgtttctggaattcttcaaaatattgcgcgagatggagaccgtctgccaaaccgtgatgcgcttctatagaaaccggaagaaacttctttccttctctgatactgaattttccgaaggcgattttaggaatacattctttaggatcaaaattcgtaggatgcagcagagcgctgaaagatgtccacggaatagaagtatgccgaatatgattgatcggcaaaccatcgttgctgattcccaatcctgtagaattttgtacggtttttacctgttcctgaagtctttcattgaaaatatcaaaatcttcagaaaaatgaaagaatgaaaatccaaaagttccgtcttctctgccaatcgtgcttcccacatgaacctcatcatataaaatcacctcatcatttacaattctcagtttcagggcatctacagagtttacggcaatcatagatctgtaaagatatgccgcaaaaaacgactgtttattttgttttgcctcatcataagctttggtacagtctacttcagaagtaaatccgaaataaggacttttcattttagaaaaaaattcgaaatgctccttcctgttccagctttcaatatctataatcttcactactctattttttgcaaatgtctgtaagttttatcaattataaaagttctgaagaaataaatgtagtctgcaacgtatttttgtacaggatttgcagtaaaaaagtcaaattattatttaaagtttgtgtaaactaattttaaatttaaccgcaaaagatataaaaaagactttattggatttaatttaagtgtttcaaaagtctgcaaagagaaaaaaagctttgatttttttttaacttatgtgctcttttttcatttagatattcaacttaaacaactaaagtgttacaatcttttgcatcttttgcggtaaaaaagtttaaacaagtttttcagtaaaacgattggaaatgaaagaaaaaataggatttatcggattaggaaatatgggacatccgatggcaaaaaatttagaaaaagcagatgttcagttatatgtttttaacagaacgctagaaaaagcggaagattttaaagaaaaatctattgtttgcgataccgttgaagatgtggtaaaaaacagtgatattatttttacaatgcttaccaatgacgatgcagtgaaagacgtttatcagaaaattctttccgtggatatttcggaaaagctttttattgatatgagtacgatttcgccggaaatgacgggagaaatttcgagtgcggtaaaaattaaagaagccggttttatcgatgctccggttgcgggaagtacaaaacctgctgcagaaggaacattactgattatagcaggtggagaggaaaaagatcttaaaagagccgagccttatctgcaaaagcttggaaaaagcattaaacatttaggacaaaacggaaaaggaattgccgcgaaactttctgtgaactatttcctttcagcaatttatcagggacttgctgaaacggtgctgttttcagacaaactgggaatcgaccgtaaagatatgctggaaattattaatgaaagtgcgagcggaagtggtgctacgaaagtaaaaacacctcttttaacggaagaaaattacgatcctgcttttgctttggatctgatgctaaaagatattcttctggctaaaaatgcaggagcagatttccccctgtctgaagctttaattaaaacctaccaatctgctcatgatgaaggttttggaaaggatgatgtgatcggaatcattaattatctgaaaaaatagctcaacaaaaatcttcttaaaatatatcatcttcaattatttttatgttgaatttttcaattgtggtcgggtttttgaataaacaagagtaattaaaattcagttttaacagaaaatcaatcactaaaatataatattatgtcaacagaaaatcttacccacacagaagcagttaaaaaaattaaggaattatctgaaaatgcaagaatctgtatgttttgtacggaactggataaacttccgatcaattccagaccaatgtcgcttcaggaaaccgatgacgaaggaaatctttggtttatcagcggagatacaagcaacaaaaactttgaaataagagacgataaaagagtgcagttattttttatgaacaattctgattatcaatatctttcggtatacggagatgctacaatttacaaagacaaatcgacgattgaagacaaatggtcgcttatggcaaaagcatggtttgaggaaggaaaagatgacccgaatgtatccatcatccgtgtagaacccaaagaaacctattactggaatacaaaagccggaaaactggtgagtcttttcaattttgtagcggcagcgattacaggaaatacaacggataattccgacggtgtggaaggaaaagcaacggtttaatttcagctcataaaaaaacaaaaagcagtgaagaaattcgctgcttttttattggtattttttgattattttttaatgaattttttactttgcgaaaattcaccgttaatgtttgatacggtaaacacgagaatataatttccgggctgtaatgatgaaaaatctaatttcagctcatttttacctcttgaaaaattggttttgtctatttttttaggcataatactgaaaaatagttggtagaatcctatcaaaacctcattgttaggctgtttgtaggaagttttatgaaacgtgtttcataaaactttttctttgtctgaaaaatggcaaaaaaacgtnnnnnnnnnnnnnnnnnnnnnnnnnnnnnnnnnnnnnnnnnnnnnnnnnnnnnnnnnnnnnnnnnnnnnnnnnnnnnnnnnnnnnnnnnnnnnnnnnnnntttgaacattaatcctattgctgaaaagttgatctccaccagtgcttttgtcctcttcggattaacgtgcataatttattaaaatatatcctgaatttcaccaactatttttcagtacattaccttcttttttaaacttcgtcgtcagaatcgatggtgtaagatctgcttttgaagtctttgtcgtgtttttctgatattacatcctcacccttctcgttaatgatgaaatctgtggactcattaaacatctcctgaaaactcttaaaatcttccttgtaaaggtaaattttatgcttctcgaatgtagcttctccattctctccgaaattcttcttactttcggtaatcgtaagataataatctcctgctttcgtctcgcgcacatcaaagaaataagttcttctccctgcttttaacaccttcgtgaaaatttcattttcatggcgttccttgtattcactcattgttagatattttttaatcttgttaagaacaaatataaaagttttcttttaatcacaaaattttttttatgatttatttaacatttgtgaacgattttgctatgcggttacggaattgttaatttcggttaagttgaggattttgtcggctctctgtgcgctagactctctgtgtgtgatgattatagaagttgcattacggatttttcggtctatattttcaagaatgttctgttctgtttcagtatccaaagcagacagggaatcatcaaaaataatgatgttaggatctttaatcagcgctctggcaatacagattcgctgtttctgacctccggaaagcattacaccacgctctccaaccatggttttgtactgttccttgaactcaacaatatttttatcaacatcagcaattttggcatattccaccactttttcatgagaaggtctgtcgatcgcaaatccgatgttgttttcaatagaatctgagaacagataactttcctgaggaatatatccgatgaaatttctgtagttttctaaattatgttcctttaaatttttaccgtcaattaaaatttcaccttcagtaggatcaatcaaacggcagagaagcaatgcaatcgtagattttccgcttcctgtttttcccataatcgccaaagattctccggctttcagagtaaaacttagattatccaaagctttgattcccgtattcggatagacataagaaacatttcggaactcaatatcgcctttaatttcatatttgtcgaagtttttattaacgatttcagattttttatccatgaattcgttaattctctgcatggaagcttctgctctctgattcaccgaagttacccaaccaaccattgagaaaggaaaaataagcgtattgatgtacatgaaaaaatcagcaattttcccaatgcttaattctccggcaatgtatttctgtccgccgatccagataatggcaacattcagcaaaccgataacaaataaaataatcgtaaagaagtaagcttccgtttttgccagatccaaagctttgttctgatagtcggttaccttcgtaccataattttttttgatataattttcccttgcaaaaaatttcaccacgcggattcccgaaaaactgtcctgtacaaaagtagaaatcgccgactggcttttctgcatgatcttcgatttctgattgatgattgagcttactttataaatcgcaaaggataaaatcggaaggggaagcaaagtccagagcgtcatcgagacatccgtagtaagcatataaattgcggtaattaccacaagaacaataagattggcaacatacatcacgcccggaccaagatacatccttactgcaaccacatcttcacttaaacggttcattaaatctccgatcgtggtttgtttgtaatccgttaaagataaatcctgataatgtctgtaaattttatttttaagttcatattctattcttcttgaagccacaataatagtctgccgcatcatgaaggtaaaaaatccggtgagtaaagaacagccgacaataatagcaacatagattaaaacctgtctgttgaaacctaaatttccgttttttgtaagctcgtccacagattttcctacaaactgaaccttatatatattgaaaaaattacttgcaatgatgaataatactccccagaacaacaatattttgtgcttccagaaataggggtttaatgtttttagcgctttcataaagtttcacaaaattacaaaaatcacctcagactacgaatttcataaattttaaatttcgtatctttgcacccataaaaaagctctttgaatgttaggaagacgacaaatccgtgaaaaagtagtacagactgtgtattcttattaccagaatcctgtaaagtttgatgtattagagaaaaatatgtttgccggaatagagaaaatctattatctctacatctatcagttaaactttttggttgccctgaaagaactggcagaaaatcagattgagatcggtaaaaacaaatacatcaaaaccgatgctgacattaatcctaaccaaaaattcattaacaatcaagttttaattaaattggaagaaaaccctgagagattatttttcacaggacagcacaagcaattaaaatgggatctgcatgatgatcttttggtaaaaactttccagagaatgtctgccggaaagcgttatcaggattttatgaaagaagaaggatattcttttgaggaagatcagaagtttatcgggaaattattcttaagatacattgctgaaaatgatgattttcatgattatcttggtgataaagaactttcatggtatgatgatatccacattgcgaattcaatggtgcagaaaaccataggtttcctgaaagaagatgaagaaagccgtactttaattaaaatgattaaagacgaagaagataaaacgttcgcaatgaaacttcttagaaatactttggacagttgggaaaacaatgaaaagaaactggaagaaagactggaaaactgggatcttgaaagagtttctctcatggataaagtcattttatcgacggcaatggcggagcttgacaattttccttttaccccttcaagagttatcattaatgaatatatcgagatcgcaaaagtttttgctaccgaccgttcaaacattttcattaatggaattttagataaatattgtaaagatttaaacagaatataaattatcttcatatgaaaaagacattatccatcattgctttgtctgtcataggctttggattcgtttcctgcaaaaaagaaaataaagagattacaggaactgaaactgctgcaacagattctactgcagcttcaatgcctgcaacaaagggagactctgctgctgtagctccggtttcgggagagacaactgcggctccggcttccaatcagccattaactacggttgccctttctgaaaacaattttgatttcggaaaaattaaaaaaggtgataaagtagagcatatttatgaaattaccaataccggaacaaatcctttggttatctctgaagtaaagcccggatgcggatgtacagctcctgattttacaaaagaaccgattatgccgggtaaaaaaggaaaaattacactgcacttcgattccacaaacttcgacggaaatgttaacaaatttgctgatgttttcgcaaacgtagaaaaagctccgatccgaatcaatttcactgctaatattcaaccataagatcatgaacatgttatccatatttttacaggcacagccacaaggcggcggaggaatgatgatgatcatgatgggggtgatggtggtaggtttctacttcctgatgatcagacctcagatgagaaagcagaagcaggagaaaaacttccaggaaactctgaaagtgggaacaagagtggttcttacttccggacttcacggaagaattgctcaggttcaggacgacggtttcgttattgaaacattatcaggaaagctgaaattcgaaaaagctgcggtttcaagagaatttacggaagcgcgttttggagataaatccaagacttctgataaaacagaagacaaaagagaaatcgaaaccgagaaaaagtaatttttcagtttttaaaatatttcgtttcggcggggtgagctttgctcaccccgccnnnnnnnnnnnnnnnnnnnnnnnnnnnnnnnnnnnnnnnnnnnnnnnnnnnnnnnnnnnnnnnnnnnnnnnnnnnnnnnnnnnnnnnnnnnnnnnnnnnngaagaatccaccttaataatcttaacttctcaactcaatcttaacggtttaaaaattagatttctcctccgttgaaatgccaaaatgcattaaacatatctgtgtttatttgtgaaaacatttgtgaaattcgtgtttaatcctttaactaaatcttaacggttaaaaaatagacttctcctacgtcgaaatgacagaagagcatttagcaattgtgtttattcgtgaaaaccatttgtgcaattagtgtttaaaaaatctccgggaaattaaagcgaagctcctaccttaataatcttaacttctcaactaaaatcttaatggtaaaaattagatttctccttcgtcgaaatgacagaagagcatttagcaattgtgtttattcgtgaaaaccatttgtgcaattcgtgtttaaaaaaactctgaaaaaatcaaaagcgaagcttctaccttaataatcttaacttctcaactaaaatcttaacggttaaaagaatatatttctcctccgtcgaaatgacagaagagcatttagcaattgtgtttattcgtgaaaaccatttgtgcaattcgtgtttaaaaaaactctgaaaaattaaaagcgaagcttctaccttaataatcttaacttctcaactaaaatcttaatggtaaaaaatagatttctcctccgtcgaaatgacaaaaatgccggtagatctttgtgtcattattgaaaatatttgtgttatttgtggtttaagttatctttgccccatgaatcaaaacacaaacaaaaccgttctcattttaggcgcgaattcagatgttgcgaaacaggcagcgaaacaatacgtcgagaaaggattttccgtaattgccgcttcgcgagatacaaaatctttagaacaatttgtttcggaaaataatctgaattccaaagtgaaggttttatctttcgattctgttgattttgattctcatcaggaattttatgctgaacttcctgcaaaacctcatattgtggtgtatgccgcaggttttttagtggataatgaaaccgctttaaccgattttaaaggagctcagcaaatgatgctggtcaattatacgggagccgtttctattctgaatattattgcaacggataaaaacaataaaaatctcgaaagaattattgggttatcttcactttcgggagttcgcgggagaaaaagcaattttgtttacggcagtacaaaagctgcttttactacgtatttagctggcttaagacaggaattggcttcaagaaatataaaagtcaatgctttggtgattggctacattcgtacaaaaatcaatgaaggcttacagttgaatgaatctttaatgatggaacctgattatgtggcaaaacatatcgtaaacgcaggaaattctttcaccattgttccgaatttcaaatggaaaatcatttatctaattttgaaaatgctgcctgaaagtctggtggcgaaacttccttagttattttttgaatttagattttatctttaaaaagtttaaaacatcttcatactgttctgtttcttctttactcagtaaaaaagtaaatggagtacccatatcaatacaaattaaaattgtcttgtcagaaaaactgtaggtaactttttgccaaatacttcttatatcatattgttcacttttgatataaaaagaatgctcatctaaaaataattctaaaataggattgaactttttgagttcagcgatatgttggttaattttagaagtgtaatttaatttattgaaataaaatatacccacataaatagaacacaacactaatgaaaagtaccctagaaagtttaaaaaatcaattctgcctccgtcagccttaaaaatactgtcaataattactaaaaataaaatgacgaatacgaaattcctaaacaaagagggtaattttttcttccacgaataataaaaatatttttcaagttgctttcttgtgattttttcgtcaaagttgataaaaactttcaaagagttttccatgtatggttattttgcacaaaaatatcaaaattaattactatttcccaacaattccagcgccttcatcatatcaattccctttcccagaacaggtttaaacaaatctcccttttctttaattctgtctaaagcattgtgaatgttgaaatctgtaggttgtaagccttttttcagttcttcccattccagaggcatcgaaatagatgctccttcttttggccgcaaactgtaagcacttgctaaagtctgtccggttctgttttgaagataatcaaggtagattttcttgttgtcacgcttttgtaagcttctttccagtgtcgtgagttttggcaatttttcattgacttgtttcattaaaaggtgcgcaaaatctttcacctgatcaaaatcgtattttccgcccatcggaatataaatgtgaattcccgtgcttccggaagttttacagtatccgtggatttttacagattctaaaacgtcattcacctgcaaagcagtttcaataacctcatcaaacgtattctttttcgaaggatcgagatctaaaaccaagaagtcaggatgatcgagatcgggaagtgaagaattccacggattcatatcgatacagcctaaattgtttaaataagctaaagtagctttgtcattacagtaaatataatcaatgtctttatcattcgattccgagtaaaccttcgttgttttaacccagtccggaatactgtcacctgcatctttctgataaaaattctgctcttcgattccgttcggaaagcggtttagcgaaagcggacggtttttaagatggggtaaaatatagtctgcaaccgactggtaatattcgatgacatcgctttttgtaatttcatctttcggaaaataaattttgtcctgattggttagttttactttgtgtcggtttagcgttatttcttgttcgttttcagaagattttatcttttttgaagttgtcattttagtcattttgggttgggaaatagtttctgtttcttcggaagtattttcaacatcttcaggatttttgtcttctctgagcgcgataaaaacaggatgtctgaaaattccgtctttggtaatttcggaatattttatttcgcagaccagttcaggttttgtccacgtcaccggcatattggttttaggcttattttcgaatggggaagttgtaacagtaatcttttctaatttctgaagaatttcctgaatcagttcacggttaaatcctgttcctgtatgtccgccgtaagtaagctttccgtcaatatattttcctaaaatcaaagctccgaaaccttctcttgaaccgcgaggttctgtaaaaccgcaaataatggcttcttcagtattggtgaattttattttcagccagtcggaacttcggtgattttctacataaatgctgttgacttttttagcaatcatcccttcaagcttcatctttttcatctgactgaaaaatgcagttcctttttcaggtacatgatcacaatatctgatgacgtcggtttccactaaagcttcttttaaaagttctttccgctgaatcaaaggaagttcttccgtagaatgaccattcagccataaaatatcaaaaacctgataggtgagagccagattcggattatctccaatctgctgaagccattggaaannnnnnnnnnnnnnnnnnnnnnnnnnnnnnnnnnnnnnnnnnnnnnnnnnnnnnnnnnnnnnnnnnnnnnnnnnnnnnnnnnnnnnnnnnnnnnnnnnnncagattctattatatctttgtctagtacttcgtacatgggctgggaaatttaagttttttttgcaaatacaatatcttaaatctcagccttttttccaaagaaaaaagtttaaatgacttcattatttggatttgaatcaaatacatttccacagcatagggaagtagaaaatcattttaaacgactactcactataatcattcataatatttttagatccaaaggattaagacactatgaaatgtctaataagagatttgcatattatttacctatctataataaaatccagaaaataaaatttacttatccatattcttcaaattcaataaaacctaaatcaaaaactatactggggaaatatgaggatataggaaactggcactatgctgtttctgttcagcccataatatttccatttatagggtatagcatcaagtctcatttactatttagcagtgatggatttgagattattccggatgataaaaaacaacattcctacaggagaaaaaagggcaaaagatttttcaatgaagaatggagagacatgtatttagcttttattgcaaggcttgtcgacaaagaaggaagtataaaaatatctgtgaacaaagatgagcagatatttgaaatgaaaaagtggccggagacattttggagtgaagtgggttataatgatcctaaatctttaatggacattgataaggtagaaaattacagagggagataaatgaagaaaatcaagaaataatagaagagaatgattgaaccaatacttacatatatatctgaaccactgttgaattttggtaatggtcagacagcaattgatccaagggacggattaatgttatttggtccttttgataagcgaaaagtaaaaggtagtaaaaacattggaatcataggacctgaaaaattgcgtgataaaatgaaagagtatttgaaaaaaatacataaaccaataataaactctgacagaactattgcaagaccaaattttccgggactagaaacaatttttggaatttctgtaaattttgataacgttatagaaagtaatgttgacgaaaatgaaatcaaaaattttctgaaatatacagatgcccaccaaagagttcataatttagtaaacttatatttagagcctctattaaaatataatgaaaatgaagaaatgcccgtagatgtttggtttgttgtaattcctgaagatatttttatttatggtagaccaaaatctcgtattccaaaatctcaagaaaatgtaactataagcctgaataaaaatcctattatggaagatttattttttcaggaagaaaatgatttgcttagagaagcatataagtttgaggttaattttcataaccaattaaaagcaaaaattcttaatgctaaaattgttacacagattataagagaaagtaaaattgcatacgaagatatttttactcctaaacaagtagaagaagaatttaaatttgaaacagcaaaagcatggaatatttcaaattcactatactataaattaggggaattaccttggaaattatcagatgttcgttctggagtatgttatttaggattggtatataaaaaaacagaaacagatacgaaaaataaaaatgcctgttgtgctgctcaaatgtttttggattcaggtgatggaatggtttttagaggaaatgttggtccttggtggaatccaactacgggtgaattccatttgtccaaagaagatgcaactgaaatagtaaatcaatcttcagaagcatataaagatcgatttggaaactatcctaatgaaattttcatccatgcccgaactttttttgacgatgatgaatggtcaggatttgatgaagctgttgaaggcaaatcaaaaattataggagtaagaattagggaaggaaataactttaaattaaatcgtcaactttcttattgtgtccccagaggaacagtaatgatatatgacgattataaagcatttctttggacaaaaggttttatacctcgatttaaaacacaaataggtttggaaacacctaatacaatagaagtttcaattacaagaggtgaatctgatatagaagttgtatgtaaagatattttaagtttgacaaagctaaattataatgcttgtatttatggagacggtgtacctgtaactttaaaatttgcagattccataggtgaaattctaactgccgggaaagacattaagacaggagttttaccatttaagcattatatataaaatcacaccattttattaccatgtttagtattaatttcctgacaatctggagaattatactattaataatcaaaaaaaaaattatccatatgaaaaatttagttaattttattataaactaaataagcatggatattaaacttctggatcggctaacttccgattctccaaaaagaatcctatctcttgatggaggcgggattcgaggtgccttatcgctaggctatctaaaaaaaattgaaacaattcttcgtgaaaaagagaataatcctaattatgttctaagcgattattttgatttgattggaggtacatcgacaggtgccataattgctactttacttgctttaggtaaagaagtggatgaaatcaaagatatatatatggaactagggggagaaatctttgctggaaaacggaattggtggaatcctttagagacttttaggtttttcaaagctgaatttagtgaaacaagcttgattaatagtcttaaaagacacgttggggatatgacattaggaagtgataaaataaaaacaggtttatgtattgttgctaaaagagcagatacaaacagtacatggtttttacttaatcatccaaacggaaaattctacgattctaataaaaatatacttttatggcaggctttaagggcaacctctgctgctccatcttattttattcctcagacaattgatgtaggtaatggagaaaaagcagcgtttgtagatggcggtgttagcatggcaaataatccgtcgttaggactttttatggttgctacaatgaaaggttttccatatcaatggaagctaggagaagataggcttaccttaatttctgttggaacaggatatacagaataccgcaaacacacaaagcaaatcgatgaatcctggttattatcttgggcaaaaaatgttccggatatgctaatgcaggatgcaagctggcaaaaccaaattcttttacaatggttctctaaatcacctacgacaaaacatatagacttacaaatgggcgatttacaagaagattgtctgtatgaaaaaccaatactgaattatttaagatttaatatttgcttgtctgaaaactcattaaatggtctagatttaaaaagagaatttacctctcgggatattaaagacattgccgaaatgagtaatgccagtaacagatatcttttatatgatattggggagaagagttctgagaaagaagtaagaaaagaatttttcaaataaattttattaaataaactttgacaatgagttttcaaataattaagcctgaaatattaaaatttatttcaaaaagtataatttttaataaatgtgttttggttttgggtccagacatttatacaaaggagattaataacgaaatcgttgatagaaatagatttttcaattttctacaagaatcgaacccagaaacgagaatctattttgaaagtgaaggtgtgctaaggtttgatgataatgataaatttgaaatttggcaagaagttgaaaatttttattctgggaaaggagatgtacagctattagaaactattgctaatattaagtttcctttaatcattaatgcatctccagacgaatgcttagaaaaatatttaagaaacgaaatgggactaaaagttttggctgaaaaatttgatggtgagcaagatgaaaataaagatattgatttttcagatggaataccattaatttataatgtttttggtataggttcagatgctcaaactcaagttataactcatgaaagtctattcaaaaaaatgcaagaagttttacctatgaattctttcccccttaaagtaaggaacttcttacgtaattctaactgttttttatttcttggttttaaattcgattcttggacttatcagttacttagctataaaattattaatggcatttctgataccaataaagaaaaatttagctctttagaaatcaaaggagaatctgaagactattctagccaagataatattatcatgagtaaggtttttggaatgaagcttattaatacaactccattgttatttttaggagatttattaaaatcaataaacggaattgaaaatggtaaaactaaattaagagaagtcggttatgcggataaatatagtgcatatatttcttatgcaatggaatcaaaaaacgttctggataacatcagtaatagatttaaagaaattctatcagatattaatttgaaagagcaatctaacaccgaattacaattattacactataaagatgaccccactcacagatttggaagtaatattgattcttatgtgacaaggcttggaaaagggaaaacagtcatattaattgtaaatgatgattatttaaagtctgaagtttgtatgcaagaagctttaattgttcataataatcatgataatgatggaagagttttttttgtgattctttcagaacaaaataaactgaattttgtagaggaaaaatttaaaatacaagaaagatactatgattattggcaagaaagattaatcagaattacttcaaataaaggttctgatgctcgggaaataactgcaattattagtattagagattttatttttgattttatgaacaaaatttttgagaccaatagtttagtattagatgctccaaattttgcaaatgatattgatagagatgcttttattcatgatataattaacaaaatgaaagaaatatgagctcacaaaaaaaatacagatttccgggtttaagtgtttataaaaaagaagataaagatatttttaatggtagaaatgatgatgcggagaaactattaaattcgttattattgaacagaaccttagtctttcatggtgactctggagttggcaaaagctctctcattcaagcaggattacttcctttgattgatgacaatattgaaaatgtcaaattatttccagtagatataaaaatgtctgatattaatgttaatgaagatgaagataatttagtaaattttgtgtctaacgaagttttaaaaaaattagataaagttcttgaattcaacttaaatgacaaactcttggtgaatggagattttaatgagaatacattgtggttgattaataaaagaattgaaaaaaatgggaaaagtttattacttatttttgatcagtttgaaagtttgcaaacttttagtttctcacaaattcttaaacttaaaaatgagctttatgaattattagatagtaaaatgcctagtaatatttattcaaaaataaagaaaaaacttaataattcatttgatgatctagaatttaaaaataaattattactggagtttgatttcctaagccaacctagtaatgctaaaatattatttgttataagagaagataaactaggggtaatgtcatctttttctgatctatttcccggaattttaaaaaataatttttttattaaaccacttactaaaaaatcggctttagatgttcttcttcttcctatttctagacaggataacatatttataaccaaacctttttcattcgaaaatattgagttagcaaaaaaacttattaatcaagttgcagatgctgattttgtagatccaatacaactacagatagttgctagaaatttagagagaaatgtggttcatgctaaggataaaaccgtcattagtgaagaagatataccagaagtttcggatattatagaaatgttttatcaagaatgctggaattctttagatttagaaaaagagctgtctaatgaaaaaataatcgatataaaagaaaaaatctttgatgaattagtttcaaacaacaacaggattttatattataaaggtcaagtaaaagaggagaatgaacaaagagtcatagagaaattaagaaaagaaggtttagtgagaatagttctttccgaaagaattgaatactatcagttatcacatgatcgcttaatagagccttttaaaagggatatcattaagagtaaagaaagaacttctgtagaaacttatattaaggaggagaatgagaacttgattttaaaaattgatcatctgaatctattatataaaaggtataaaaaatttcttatttttttactttttctagcaattggagctattttatacaaagtgtataacgatttttctcaaaaaagtaaaatgaagcaaatttttaaaatttctccatataaggaatcttatttatactatgctgaaaccaacaggtttaaagctgctatatttaaatattgtactgatgaaacaaaatctcaaaatgaaataattgatagattcaattctaagctcgtaagagatactcttgaagaaggtgccaaggctgattcactctttaaaattggaaaatatgaagaaggaattataaaatataaaatagtgcaaagttttctaaaacagagaaaaagaaatgcccgtgatattaattcattaattgatggatataatcatgctaaaaatgtatttgaaatatttgatgctgaaagacagaaggatccaacaaaaataataaaaaagattaatcttgagaagaaacaacttataatgattccaaatagtattctaaaatataagtatgttgaagaattagaattgtgagagaataatctacttttttttccgatgaatattttaatgctagagaatataaacaatttaaaacttcagaacaataagattaagtccataccaaaagatatctttaaagcaaaaaaaatgtataatcttaatttgaattataactttatttacgaattacctgaagagattggaaaattaaaaaatctgaagtatttaacattagtttctaataaaatctcctcattgcctcaaaggattgttaatcttgatagattagaggttttagcattgtctgaaaatgatttgtttgtattaccagagaatgctctaaaattaaaatctctgaaaaaattatatttaaataattgtaagatatctaatcttccaaaagattttaaaattctattaaataaatctactttagaaacaatttacttaaacgaaaatccaataaaaatcgaaggtacatttactaataaatatggaaaaatagtaattataaaaaataataaacttgaattttgatataaatataaaaatttaaaaactaactaccatgaaactctgctttgtcataatgggttacggcaaaaaaactgacccaaccttaggaaaaacgtatgatttggataaaacctatcacaatattattaagccagcagtagaaagtgctggttttcagtgtgtccgaagtgatgaaattctagaatcgggaactatagataaaaatatgtatgcattacttattcacgctgacctttgcatcgctgacattacaactttcaatcctaacgctatatatgaattaggaattcgtcatgcagcgcgccctttctcaacaattattatgagagaaaaagatggaaatataccttttgatttaaatcataataaaatttttacctattcccatatgggagaagatatcggccatactgaaacagtgagatgcgttagccaactagcgcatcttatagaagaagttgataaaacaaaggaaacagacagtcctctttttcatcatattcaaggagtacagccttatacgcttcctaaagaggaatatacaaaaatcattgatgatctagcaactaaggaaaatgctctttttgccaccgttgaagctgcgagaaacaagatggagcaaagtaattttttagaagcaaaaaaactttggaagaaagcaagtgaaagggttgacaacgattcttactatatccaacaatgggctttagctacttataaagatgagtctgtaagtccggctgttgcactcgcggacgcattaacgattataaataaattagagccggaaaacaggaacacaactgatcctgaaaccttggggattacgggagctatatataaaagattatggcttgaaaataaagagaatatcgaatttcttgatcgagctatagaatattacaaacgaggctttacaataaatcaagattattatacaggagaaaattatacactttgtttagacttaaaatctgaaatcacaaaagatgaggacgaaagaatttatttaaaatttgctgcaaaaaaaaatagaaaagaaataataaacatcatagaaaacttaaaagaagatgaagactttgagattagaagtgatttaagatggatttatgcaactttagcaaattgttacttttctttggatgataaagaaaattttgaattatataatagtagatttttagacttggccaaagtagactgggaattagattcttaccaaaagggattggaacatcttaaaaaattaaaaaaataatatggcaaaagaatataaaatttttgttagccactcttgggcctaccacagtgatttagaagcattaagaaatctattgagttctagaggatattttaatgtagaatttacagaagcttccaaagatattcctataaattctgaaaatgctacatacattaaagctaaattaagagcaaaaatattttccgcagatattgttttagcattggctgggatttacgcttcacatagtgattggatgatatgggaattaaatacagcaatatcgttaggtatcccaattgttggaataaccccacgaggccaagaaagaatttctcaagaagtatattctagatcaaaagtagacgtaggatggaatactgaaagtatcgtagatgcaattagaacttatagtaaataattacaatggcacataaatgtttcatttctttcaaaacggaagataaagcttataaaacacatatacatgataatctaaatgtggacatgattgataaatcattgcatgaacccatagattcttatgatgaagactatattatgcggaaaataagagaaaattatttatcagattccactgttacaatatttttgattggagatgagtctgccgaaaatttgggttatggaaatcaaaaatttatcaaaagggaattacaagcatctttatatcacggagtcggaaataccaaaaatggaattttaggagttgttttaccttcaatgaaagataaaattttcagaggttcttatacttgtacagcttgcggtagaaatcataattttgttagtataaatgataatactgtaattaaagaattttcttataattattatatacctaatgataaatgcgcatggagtgaagaagataggtattgtgttttaacaacttgggaagaattttgttctactcctaattattatattgatttagctttcaataaaaggactcaaccgatttctaataagactaaagtaaaaccgtaatgaaagaaaaagatttcccgaactattatattgctggagatcaagcatctttgctagcacaaaaactatatactagatatgttagattggatttgcttttaatgatcttgagtgccgcattaacaatttataattttcaatcagaagaaagcaagaaattaatttatattatttccggaattgtaatgcttattgctattattttctctctggttattaaaaataaaaagtacgaagatatttggtatcgaggtagagctttagctgaatctgtaaaaactttgacttggcgtttcatgacaaaatctgaatattttgataattccttaacagaagaagaagctaaattaagatttaaccagagaataagagagctacatgacgagtttatagatttacattcttttctgaaggcaaaaaatttatctctacctgtaataactgatgaaatgaaaaaaaataggaatctagatttaattgataggaaagaattttatttaaaaaatagaatcgacaatcaaattaattggtattcagataaagcagacacaaataaggccaaatacgaacgttggttttatggagttatcataacacaactactagcattgatttcaattggatatttagttttaagtccagaatgtaattttaattttgttggattatttactacgctgtctgcaagtttttttagttggctacaattaaaaaaatatcaggaaaataaagaagcctatacaactgcaacttcagaacttaatttaataaaacaagaagctgagtttataaatacagaagagaaattcaaagtttttgtattggactctgaaaatgctatgtctagggaacatacactttggttagcacaaaaaagaatttaatacaaaaattaaacataacttataataaatatttaatctttttttcatggatattttacaacaaagtatatttgatgtcaaagctgatttaatagtaattccaatttcaacagagggtactatgtcaaatagttttaaaagtggtttggaaaaaataaatcttccatttgaatttgatgatagaaattttcaacttggagacgttgaaataattccactaaagacaacaaagattgcatttgtatgtacagtagataattataagagtgaatattatgcgattagattgattggaagaaggcttgctaatgatattcataaatttggtaatgtaaatactatagcttttcccttactaggtactggtacaggaaaattagatccagataaaagtgttaatatactgcgtaatgctttttatgaaattgctggtactattaaaataaatttgtttttttgtaccacagacgaatctatatatcagacattgattggaagaaaatttaatcttaaatatccaagtagccaactagttatcgaagcagagttaccaaacattagaattaataaaattatagaaaagattctctatgaaaaagaattttatcatgagttagcaaataaaaagtttcaacagtttctagattttggtatgcctagttcattttatcaaaatttacatgatcaatttaaaaattctcatactacttttcaagattttattaatacaaaattatctacggatactaaagaatacaaatttacaaagttatgtggtgagttaatagcctatatcgaccttaatgcatataggaaaaatttgtggaataaatatcctgataaaagagtaatagcaaaatcggctgtccgacagaatgtttggttcttaaacctacttaaatataaaaaaactaagaaactttcatccgttagttcaaatatcaaaaatgcacttaattaccttgaggatccagagcataatctaacaatgctttctgaaaatcatagaaaaatggtttatgaaagtatgttcctaaatattgattatgaagatgtgtatagaggacttttatttgattacttccaaaggttaggactaagacctaataatccacttaatctgggtgtattgattagtagaattctttatctaccatttataaagccaatttgggaagaaacaaatcttgttaaatctggtttaaatgaatctacagatttagatttatcaatggctggagaaattattgaagagtgtctgcaaacaaaatcattactactagatttgggtaattgtggacttaccgatctttctgttattccagaattgtttgagtgtacacatattgaaatgttaattctaagtaatgaatggtcagaatacaaagaaaataaatggaggaatgttacaagccgtaataaaggaaaaagaaataaaatacggtttattcccaacgatataactaatctaaaggaattaaaggtcttaatttgtggaggtgactggtatagttacgataaagatagatggggaatacagaagctaggattattaacatcattgcagaaattagaatatctaaatgtcagtaataataaattaacaaatcttagtggtgtaaacaagttacaaaatttaaaaattgctcatttaaataacaatgagattactacaatcgaatccttagaaaaaatgaatgatcttgaggaattatatttaagtaacaataaaatagaaaatttagactttttgaagggtttaaaaaatataaaaaccttagacctacaccataatcgtattagagatttaacaccagttattgaaataattgctaaaataggaataagcaatgagaaatggatagtgaatacatttaatatatctaataaccctttggagcaaccaccaatgcaaattgttaacttagggaaagaagatgtattaggtcattttaaagatattaagaaaagtggacaatatgtaaataatgaaattaaggttattttagtaggaaacagtgaggtaggaaaatctacacttttaaagtatcttgataatgaaatcggtttagaagatgaacatcccccaacactgtggatggaagaaaaaatcattaaaagcaaatataaaattgcagaacttaatgaagattgctttttacatgtttttgattttggtggtcatgattatttccatgatacacatcatctattttatactagtaatacaatttatgttcttctatgggatcaaaagacagatgttcttgaattgagaaaaactctacaaaaaacacttgaaggagaagatgtagaaattgaaactcaagattatccattaaaatactggcttgattctgtgaaattttatattaggaatgttgaagcgaataactttgaatcttctataaaaagggaagtgtcatataacagttcattattactgttgcagaataaagtagcagatgcatcacagatagtatttagaaatggaattgatttaaaagaagattattcctttatctacgaaatgatcaatgtttcaataaagaatccctctagaaatatgattcattttgataatcttttatcagaaatgttgaataatatggagattatcggagctattcttccaaagttttatgcaccaataaagcaaagtattgagatatataaaggaagtccaatattaacatttgcagaattcttagatcattgcaataaagttatagaacaaccgattgatgaagaacaatgtagaaggatgatgaaatatttacaacaaataggtgcactattgtattcgtctagaggactagatgagaaaatatacatcgataagaggtggattatagataatattcataaaatccttaaaaatcttagcaaagaaaacggaaagtttaatagaaattatgtcgtaaaagttttgggtaaagacgacaagtctgtagatgatattttgataatgatgcaagattttaaaatgattttcaaacatccatattcagaatattatatagcaccactttatctacctcaaacaccgtctggaaaaattggtttgtttttagataaaaaacaaaagccctggcgtagattcgagtataaaggttacatacataaaagtgtaattttaagtattttccaggaatttggatcccaaatccctgttgaaaaggatcatgacagttactactattggaaagacggtttaatagtaaaaagtgctttaaccaatgaaataataatgataaaatttcatcttggtaatcaagatggtaatgcatgtattgatatctatgaattgaacaagtctgataaaaccatatttagagatcaagttagagagttcattaagagtgtaaatatcggctatgacctagaagaaatggtaacacttgatggagaagattatatttctaaagatatattagagaaatttgctaaaattggaaagtatgtattttctgagaaaaaatcaaaggatctaaaaaaatcaaaacaagatgaaaaactctttaaattaaaggactttgcagaatttattgataatccagtggcgaagaaaaaagtagtaatttcctattccaaaaaagatttggctcatgtacatacattaagacgatatctacaaccattaattgattctgatttaattgaacaaccttggtattgtactttcttaaacccaggagatgattggaataataaaataaaaagcaattttgacgaagcagatataatattttttatgatcagtgaatatttttatagcacaaaatacattgttgatcatgagattacaacggctattgacagatataacaatggtgaaaaggttaaaatcatcccaataatcttagagttttatgattggggacgtaaagatccttataatttacaaaggttttcagcattaccatatcaagctagacctataagtggttttaataatgaaaaattggcttggagtacaattacatcatcacttaagatgatgattgaaaaagatttagatcctgctaaaattgatattattggcagggatttagaagaaatttatgagagactagttaatagtaaattagataagaattaagagcatgtttaaataaaaaagtagttttttatttaaacatgctctgataagtttcgttttgcggtaaaggaagagcaaccccaactggccgaagctgagaatttttctaaagcacttcgtgagatgagtgatgacgagtatcaatttttactggcaagtttagatccgaatattccaagattacatccggaacatttaatttcacatttatttgcaatccaaaacaatagtgattttgggaaaacatttgatgacactttaagacaaatatcgattgaaaatgcagatgttttttctgtaaaatcatttagcggtgcaaaagatactctgtttgatgagcttactcagtttatctctgatgcttctcaacgtgatgcttttgcaaaagcattgattaataagttgtttgaattttcttttgaggaaatgtttgttcagaaatatgatttctttgccactatttttgaatatctgattaaagattataacactgacagtggtggtaaatatgctgaatattatagacctcacgctgttgctcgtattatggcacaaattcttgtaccagataaagttaaaggtgttaaatactatgatccgagtgcaggatctggaactttattaatgagtttagcacatcagattggcgaaaagaactgtaccatttattcagaagatatctcgcagaaatccagcaatatgttatgtttgaatttaggcttcattactgctcaaagtgggattgaaaagaaaatacgtcaaagattaattagtaatgggtggcttcggggtgtagtaagtatgcctagcaatatttttgcgagtacaggaacaaatgtatctgttttgttttttgataaaagagcagatagcgagcatattattttaatggatgcttccaagcttggaaaaacagtaaaagaaggtaaaaatcaacgtactgttttaactcccgaggaagaagctaaaattgtagacacctttaatcaaaaacaggttgttgaagacttgtctgttgtcgtaacaaaagaacaaattgcagaaaagaattactctttttctgcaggacagtattttgaagttaaaatagaatatgtagacattacaccagaagaatttgcagagaaaatgcaagactttgaaacaagtttacaaagtcttttcgcggaaggaaatgctttggatgtaaaaattcaggaacaattaaaaagtttgaagtatgactaaatggaagcaaacttctattggagaattcattgattttaatcctgcagaaagtataaagaaaggaactttaactactaaaataggaatggataaattaggaacttttcagagaaagatcaatggctgcgaagaagtagaatataattgtggaccaaaatttagaaacagtgacacagttgtagcgaaaatcacaccttgcttggaaaacggaaaaaccgcatatgtagatattttagaagaaaatgaagttgcatttgggtcttcagaattcatcgtattacgcgaaaatgaatgttctgattctaagtttatatattatttagcgagaagtccactttttcgcgaaaaggcaataagttgcatggaaggaacttctggcagaaagcgtgttaatgaaggagcattaaaaaggcaggagatgttagttcctgcatcagtaatgcaacaacaaaaaatagcctcaatactttcatcattagatgacaaaatagaactaaatagtaagataaatgataatttagagcgtagctaaaatggctgtatgactattggtttgtacagtttgattttccagacgaaaacggaaagccctataaatcaagtggtggcaagatgatttggaatgaaactttgaaaagagaaattcctgaagattgggaagtaatagtttttaatgactggatagaaaaaacaaagactggagattggggtaaagataagatcgaaggcaattatacagaaaaagtttactgtgttagaggtgctgacataaatggattaaatggcaaaggtgaagttaaaacacccaaaagatatattctaaaaaataatatatcaaaggctctaaaaccagatgattctattgtggaaatttcaggaggaagtcctacacaatctaccggaagaattgcccttttaactgaaagtacatttgaaagatttgattcaaatattatatgctcaaacttctgtaaaggtatttgttattttaaaatatataattgtttatttagttttagaaaaagcaactttaaagagttttctagcataaactgctttttagagtaacattttgttttccttttgaatctcgctagataatgccttattctgtaattatagctctcaactgtgaatgtttccgattttgattcgcaatgtttctctgtaggaattaattctgaataacttttccaatagtcactgcaaaaaccattaatttccctgtcttttaaactgttccagagctttttgaaagtggaagtatttcttttcccacaaataaaatcgatgtagcgctttccaaatctatcaacagcaacccagctccaacagtagttttttttattttggatgtagctgtgaatttcatctaattctactatttctataggttcttgaaattttggcaaagaaaccgattttccccactttttcacccattgatataccgttccgcaactgatattcaacactctcccaatagcccgaaatcccattccttccaaatacatttctaatgcaagccgtctttgctcaggactttttacatccgatttgctttcaacactataaaagcatccacagtttttacatttatacctttgtaaacctcttgtaaaaccagcttttactttatctaatgattgacatttataacatttcataatactaattaatgaaatatattttaatttaacaataccctgtaaagctatttctttaaaagaaaacgagttctctttcaatttcttacaagaatggcagaggttatacgatgctgatgttttttttagatatgagggaaaaactagtggaattaaaaactttctatttgaatcctttatggagtcttatttcgtaataaaacctcagaaagtattagttgaaaaattttataatcaaataaaaaatatagaatctaagaagcaatccaaccttaaacaaaaccaataactttcccaactacgcgactggcttttacctatgctgatgaacgggcaggtaaaagttgagtaaaatagtaatataaattatcatttattttaatcataataattattctacagtattatcacaaaaaataaaaacagaagccaaaggtactttgctccctaatccaacaactaaattctgtcaaggtcaagccctccggattttcagaaaaactttttacgtataaaaatctacgtaaaaactttttccaaaaaaccttgacagaatgccacgctcattttcgaaaggctttctttttttaattttttttcttcgttttcttttagaaatatttcaactgagaaatttcaagcgcaaagagaaggactaaattcttgctttgaacactaaaaaaacttgttcaaaatttgaactttttacttgcagatttcagcagaaatttttagttttactacgtaaaatttaaattaagattttaccacttttttgcacatgtcctatttgaggccattcacagagatgctacagcgaaaatcttatccataaagcgatgagaaatggacacaaaatccctcactctccgcaaaaaaatccttcaaattcaatttgaaggattttttatttaactgttttctgaggaattggatttcaatttcaggaacatataagccagtcctaatcccaaacctgctaaaactgcaatttttgtttttcttgaaggaaccggaagcatcgtctccccataaattcggtgaggctctgaggaaggctctagaatatttccggaatcggatggggcatttttcactttcatcatcagtctcatgactgctgaagcggcattaatgacaggttttggaaataacccgtaaacgtttttcaggaatgctgaagtgaaatccggaaataaatctttttttggacgttttgccaattccaccattttagcagctgtatctcgtgggtctgcagcaaaaggaggaactttaaaatccagccctgaatattttgcagagtgcatatttcctgtagaacgctgaatctgcggataaagattacagatatggatctgcggaaaatctgaaatttctccatgaagacactccatcattcccctgattccgaattttgtggaagagtaaaccgcactgtaaggagctggcataaatccgccaatagaaatattgttgattaaaattccttcattctgttttttaaagaccggcaaaacactgtaagctccatgcatatagccgaaaagattggttttaatcacctgttcatttacatccatcggaatttcttcaaatttcccactggacattactcctgcattatttacccaaatatctattctgccgttaaactgcaatgctttattagctaaattttgaacatcgcctgcaatagaaacatccgtgggaacagccatagcggaaacacccaaatctctgcataaagccacggtttcgcccaaagcttctttgcctcttgccgcaactacaatattacacccttccaatgcaaatgcttctgcggcagctcttcctactccactgcttcctccggtaataactacggttttccctctgagacttttttgttcattattagaattcattttgtgatggttttggttaattacctgtaatcaacctattattatgccataccgagtataaatatcatttaaattcttctgtatttatctaattccgagataaaaaaatagatgcaggatgttataaaatttttatactataaattttcgttaatattcttaattaatcttaaatacaggtttttcagtattttcttggcacaattttttaatactactaattactcatgtttaatttgagttttcatggttattagtttttatcctcagattctctctgaggattttttgtttttttatttctggaattttcagataaaagcaataaaaaaacagacctttacagatctgcttctttaataaataataattgtctttaaatatgcttaaacagcataagctcctttattctgaaaaacattaataacttctgttttgttgttaatggtattgtatataacctcaacggtaaaataagaaacttcataaagtacatattttactgtatccattgttctttcgctcatgatacgtccttcattcatcacgaaactgcactgtgcctgatttggcaaatttttaaaatcgtagtaagaaatcatagctttgttttttaagagtttcaaatagagacacacaatttctttgccaattttcttcaataaagttaaatttttaaaatttaaataaaaatacaccaatacagtgattatattcacaataaacatcatccagcatttaatggtcataaataattatcatattaaatttctttgattaaacggttaaatttattgtctcgaaatgataatttattaaataaaccaactatctttaaactttaatatatatgaatttatgataaatgatgctaaaacgggcagcagaaactatactgttccgttgattaccattacactattgttttttatgtggggatttatcacctgtatgaacgacattcttatcccttatcttaaacagctttttaagcttactttctttgaatccatgcttgtacagttctgttttttcggagcttacttcatcggttcactgatttatttccttatctccaccacaaaaggagatcctattgacaaagtgggttacaaaaaaggaatcattttcgggatttttcttgccgctttaggatgtgtacttttctaccctgctgcaagtttttcttcctacggattatttttgggagccttatttattttagggttaggatttaccgttttacagattacggcaaatgcttacgtttcgcttttgggtccggaagaatccgcatccagccgcctgaacatgacgcaggcgttcaatgccttcggaaccacaattgctccggttttaggcggacatttaatttttgaattgttttccgctccggacggatctttcagtgcagctgcaactaaaattccttatctcatttttgcagcaattctgcttttggtagctttgcttatttcaagagttaaacttccggactttcaggtaaaaggggaagaaattgtaaaaggattcggagctttgcagcacaaccatctgaaatttggagttcttaccatgttctgttacgtaggaggcgaagttgcagtgggaagtttcatcattagttttctggagcagccacaggtgatgaatctttctgaagtggtaagcaaaaattatctttccctgtattggggaggcgcgatgatcggaagattcttaggtgcaatttcccttaatcagtcaatcagtcaggcaaaaaaagctttatatatgttgggagcggctatcgctgtatttttggttattttcagcattgtagatcttagtttttctcagatcagcttctttttagtttttattgccttaaattttatcgcgttttttatcggaaaatctgctccggcgagaaccttatctatatttgcgggagttaatgttctgttattgatttctgcaatgtttaatcatggcgaactggcaatgtacagcattctgggaataggaatctttaactccatcatgttctcaaatatttacactcttgctatttcaggattaggaaaatatacaagtcagggctcttctctggtggttatggcaattctgggaggtgctattgttcctgtttttcagggatatttagcagatattttcggggttcagcattctttcatcattcctgtattctgttatatcgtcatcctgatcttcggagcttattgtacgaagtacctgagtcatgtaaagcaggaagatggctcaaaagccggacattaaattttcagttttaaaataaagaaacctgcttttacagcaggttttatttttatattatataataagttccttagtatcggtgtaataaataataggctcatcctcagaccttgctccttttttagacagagattcaagatggataatcttaaattttttgggtttataaatttttaattcatttttattttcatctactattactttttcagcatcatcaaaatttatataaggtgatactacagagacatttcctgtataaactgttactttttccttagtatttctcgtaatattttcactcttaaatttcagagtatcgtcgccggaattgtgctgagaaaaaactttctgcgaacaaagcaacattaaaaacactccagtaatctgtattttttttatcatatccatttgaatttaaactttatattaaacaaaactaaataaaaaaattacagcttaaagaattataacattttttaagaaatcacatcacaatcagccaaaaacttctgcaaagcaatttatggattttaaaatcatgatccatttattaaaaatttcatgttgttatcgtatttaaataaaaaagaaatacattatttaaacactctctaatcctactattcatcgggatattcaaatttacacagttttaataagatgaatttattgatctgtaaaacctgtataaccccaaacaaaccagcacaaaacaatcaaaaaacccatcaataaagcattataaattatatatcaattaaaatatttcattatgtaaagaaaaaattttacttttaatcagaatttttaacagatattataatggtcagaattttccttgtggatgatgatcccttcatcggagaaatgcttaaatatcatcttcagcttaatcctgattatgaagtttttctttacagttctggcaagcaatgcctttctgaactttaccggaatcctgatatcatttgtatcgatttcggcttgcccgacattcagggagacgatctttttaaacagatcaaaacactctatccggatctgccgatcattgtaatcagcggtcaggaaaacatttccgttgccattgattttctgaagcagggcgcaaaagattatatcgtaaaaaacgaacacaccaaagaacttctatggagttccattatccgcctgagagaaaatatctcgctaaaacaggaagtggaagaactgaaagatgaactcgaaaaaaaatacagttttgagaaaacaatcatcggacagagcgattccatcaaaaacatattttcaaagatcaataaagcactgaaatccaacatcaacgtttctgtaacaggcgaaacaggaaccggaaaagaagttgtggcaagagcaatacattatcattcttccagaaaaaacaaaccttttgttgccgtaaatatggcagcaattcctaaagatctggtggaaagtgaattttttggtcatgaaaaaggagcatttacaggagcaacagataaatcggtcgggaaatttgaacaggcaaacggaggaactatttttctggatgagatcgcagaactggatctcaatcttcaaagcaagcttcttcgggcattgcaggaaagagaaattacaagagtcggaggaacccagaaaataaagctggacgtaagactcattattgcgacccacaaaaatctggcaaatgaagtaaaaaaaggaaacttcagagaagatctctattacagggttatcggtcttcctatagaattacctccgctcagagaaagagatcaggacactttaattcttgccaaacattttatagatctttttgccaaagaaaacaaaatcaaacctctggttttggcttccgatgcgcgaaaaaaactcatgaaatacagctttccgggaaatatacgagagctgaaatccgttatcgatcttgcctgcgtaatggcagaaagcaacgaaataactgcggatgacattagcttttacagccttgaaaaagaatctgaaaattttctttctgagcaaaaaacgcttaaacaatacacgacagatattatccttcacttcctgaaagagaacaataatgacgtcattaaaacagctaaaatattagacatcggaaaatctacagtctataatcttatcaacagtacagaccttaaaaaaactaaataatacatgaaagtcgctaaactactttttgctgacgggatatggaaatctgaaagaaacaatgaaaatctggactataataaagctcagcttgctttaggatatggcagccggaatatccttgaaaactctgatttttttgaggtaattaaaacaaaattccccaacgcggaaattgccctgtcttcatcatcaggagaaattttctgcaatgaagtttttgatgaaaccgcaacagttaccgccattcaattctcttcttcctatataaaaacgcagcagattgacattaatgattttcagaacagttatgaagccggaaaaactcttattgataaactctgtcacaaaaatctaaagtgggtattcgtactgtcggacggaagtaaagtaaatggaagccaactcgtaaaaggactcaacgaagggcgccccgaaggagttttaatttccggcggattggcgggtgacggagatcgttttgagaaaacagttgtagggcttaacgaaacgcctgtctgcaataaaatcgttgccatcggtttttatggtgaaaaactggaactcgctcatgcctcattcggaggatgggaaagtttcggactggaaagaaccgttaccaaatcgcagaacaatattctcgtagaaatagacaataaaaatgctttagatctttacaaaagttatctgggaaaatatgcagaagaacttcccagttctgccctgctctttccgctatccttaaaaattgatgaagattctgctcccgtagtaagaaccattctctcaattaatgaaaaaaacaacatgatgatctttgcgggagatttgccggaaggaagccatgtaagatttatgaaagccaatctggaccgccttatagatgcggcaaatgatgcagcaaatgcctgccttgaaatgagccccgatcctaaactgggaattattgtgagctgtgtaggaagaaaaatggttctaggagaaagagttgccgaagaagtagaaatcgtaagagatatttttggtaaaaaagcacttatcaacggtttttattcctacggagaaatttcgcccgccaaatcttttggagattgcgcacttcataaccaaaccattaccattaccactgtaaatgaaaccgaataactatggaaaccgaactgcataacatccttaacagacagatcaaaaaatatcttacggaagattgtaaaaaacatccgcaatttaataatttcattaacgcagttaacgattcctacaaatcttttgaaagggataaagaacttaccgatcatgctttcaggcagagcgaaaaagaatacaaagagttgtttaacgatctgaaaaaagaaaatgaactcaagcaggaatctatttcgagcctttatgaatcattaagtttattagattccgcttttgataccaaaaaaaataaagaccttaaagaactttccttatacctcgccgaacagcttaaagaaagaaaaagagcgcaggacaatataaaacggcaggaagaaaaataccgtaacattatcgcgaatatgaatctcggacttattgaggtagataatgacgagattgtacggtacgccaatcagagtttctgcaacgtttcaggttttgaactggacgaaattattggtaaaaatccctcacagcttttcgtacagggagaagccaatcaggaatttatgcaggaacagatcgaactgagagaaaaaggaatttccagcgtttatcagctcccgataaaaaataaaagaggcgaactgagatggtgggcaatcagcggtgcgcccaactatgacgatcacggaaatcttttaggttccataggaattcatctcgatattacagaccaaaaaagactggaagaagaccttaaacaggaaaaatccaaagctattgaagcctctaaagcaaaagaagtcttcttagccaatatgagccatgagatacgaacaccgctgaatgcgatcataggtttcctcagagaacttaaaagactggatcttacaacaacacaaaatcagtttgtggagaatagttttaacgcggcgcagcatcttttatcaatcatcaataatattctggatatttccaaaatagaatccggcgaaatgtctttggataacactgttttctcccttaaagaatgcatcagcgacatcatcagtattcttcagccaaaagcaaggcagaaaaaaatactgttgaaagccagattttcagatgatcttttctctgcatttaaggccgatgcgctcaagataaaacagatcttgtacaacatcatcggaaactctcttaaatttacgaacgttggcgaaatatgtttagaatgtaaagtcataaaagatttttccaatcatcagaaacttgaaatctgcattaccgataccggaatcgggatgagcgaagaatatgtaaagcatatcttcaaaaaattcaatcaggaagacagctccatttcaagaaaatacggcggaaccggtcttggtatggcaattacacgcgaactgatccacctcatgaaaggtgaaataaagattaaaagcaaaaaaaatgtaggaacagagatcagtatctttctggatatgaacaaaagcatagaaaaatcagaatccaaaaatattgaagtaaaagagcacatttccatcgaaggaacgcgtgttttacttgtcgaagacaacgaactcaatcagttggttgcagaaaattctcttacccatttcgggtgcgaagtcataaaggcagacaacggaaaaatggcagtagacattctttcaaaacagcagtttgatattattttaatggatattcagatgcctgaactggacggaatagaagcaactaaaattttaagacaggaattcagactcggcactcctatcattgcgcttaccgccaatgcattcaaaacagaaatagacaactgcattgctgcaggaatgaacagctacatcaccaaaccttttgacgaggacgaactactgaaaattatttataaaaacattaaaatgcaaagtaatctggaaatcaacaactcagaagaagaaaaaattctttatgacctcagaaatattcaggcattaagccgtggaaatgatgattttattcaaaaaatgctttccatattcatcacgcagacccaggaaaccattccgatggtggaaaaagcttttgaagagaaaaattatgccgaaatagcacgcctcattcacagaataaaaccaagtattgaaggtgtgggaatctactccatcaaagaaaccgtaaaggatctggaagtaaaatccaaagagcagcaggccgattttccagaactgtacactatgtttctggaagtaaaagaaacactcttcaccgccataaatcaactggaaagggaaattaaataaaaacattccaaaataaagagattttccatattttggaatttaaaaaataattaatatattgattttcaaatacttaattaaaggcacagtaatcgccttattgttttcaaataaaaaagatggaaacaaataacaaaaatttaaagttttttattgtagatgacgacagattttgcgccaccgtgtatgaacagtatctgaaaaacaatcattatgaaaatattatctcattcagcagcggagaagaatgtctggatgaactacaccagaaacccgatatcattttcctcgatcacaatatggaagatcttaacggtttcgaagttttaaaaaagataaaaagatacgatccgaacatttacgttatcatggtttctgcacaggaaaatatagacactgcggtaaatgccctgaaatacggagctttcgactatattgtaaaagatgccaatgtttgcgaaagaatgacggataccatagaaaaaatagtaaaaattaaagaagaaatgtctcagaaccaacgaaaaggttttagaaaattcttttccgttttattttaaatcttatgttaaaaaaactcatactctcattctttttcctgatgcttctggtatcctgtaaaacctacaacgtacttgaagaggaacaggcaagccgaaatatgcaggatttcagctatgatcccaactacgaatacagaatccgtaaagacgacaaaattacgctttccgtttggggacaggatgatctgagtgtgggttctgtgtacggaatttacaactccaatgaagtatacggaaaatggcttctggtagacatcaacggaaatatagaaattccaaaattgggaacaactcccgttgtgggaaaaactcttcccgagctgaaagaagaaataaaaacaaagcttaaaaaatggctggtaaatcctatcgtggatgtaaaagtgctgaataaagaaattgcagtgatgggcgaagtgagaaatcctgcggtaattcaggtggataaagaccagaatactttactggagctggtttccaaagcaggaggatttgaaatgtatgccaatttaaaatccattaaaattctgagacaggaaggagaaaacgttcgcgttaccaatatcgatcttaccaaaatgaaagatgttccgaaccagaatatccttcttcatcccggagattacatcattgttccttccaagaaaagcaaagattttgataagagaatttccaccattattccttttgcaaccgttacttccgcagccgcgattctgataggattattataaaatttgatgaccatgaacaacgagaatgtaagatttctgaaaccgctgttacgaggatttcctatcgtcgttcttgccatgattattgcggttttggcagcaaaaaaatacctcaactatgtaacgccaatgtacgaaagcaccgcaaaactgaagcttgcggatacacaggaaggcgttccgagcgcgaatctcttcaaagattttgatgtttttgccacgcccaacaaaataagcacagaaatagaagttctgaaatcgacatcattaattgaaaaaacacttgaaaaactccccttttccaccgaaatttacagaaaaggaaaagtacgttccgtagaattgttcaacgattctccgataaaagtggaaagcattctaaacgatgaaaaaaattacgataaaaaatttatcattaatataacttcaaatcagaattttacaataaattcagattttgccaaagaaataaaagggactttcggagttcctaccgttataaaaggaggaaaaattctcattaccagaaacgacagctaccttcagtccaaacccggtgctaaaattgtcgatcagtatgaagttgaattcctgagcagagaaaaacttctggataaagtaaataaaaatcttgatattgtttccgtggacaaagatgttcccgttatcaggatcaattataaaagcaacgtccctgaaaaagcaagtcttctcgtaaatactcttgcagaaacctacattcaggattatattgaaaataaataccgcgctgccaatacaacggttgactttctgaaaaatgaaatcggacaggcaaacaataagctttccggtgcagaaaaccgtatagaaaattaccgaaacaaagaaaacatcatcaatattccgcaggaaacagaaaccgatctgagaaaaatttcccagcttaaaattcagaaaagcaatctgaaaatgaatctggatgccattaaaaatctcaataattatatttctgaaggaaaagacaactatcttgaacttgcgcccaattttgaagcattcaacgaccttctttcaaccgaaatggtgaagaatatgaaactgcttcaggcagaaaaaaaagaattgctcttaacctacactccggaacatgagaaagtaaaaattattgatgctaaaattaaagaccttaccgattaccaaaccgaaagcattaaaaacacccagaaaaatttacagatcaaatataatgacatcgaccgcgatattcaggttgcagaacaggcttttatcgggcttcccgaaaaagaaaaactgctgaacatcatgaaccgtgagtttaatctttacgaaaagaattataatttcctgaacgaaaaaagaatagacgcagaaattgcaaaagcggcaaaaatttcttttcataaaattattacaagaggagaactgccgaaacagccggtttcgccgatgcgatccatcatcattattgttgcagctattatgagcatgatcggttctattgccctcatctacgccgtacattttgcaaaagccaaagtgaatgatgtgtataccatcgaaaaaaacagtaccattcctgttgcattcaccacccctttcattaaaagcagtgaaaaaacaatgcatcatttcctcgaaaatgttctggaaatggaactgaaagaaatcattaaagataaaaacctcatctgcataacgtcttatgataaatcgaaacaacataggtttcattcaaaaaatatcataaaagctttgcaggcgcaatccagaaaagttttggtgattgatgtagccggaaatttagaaaatattgaaaacatcgattatatcgatttttcagaagaaaaaaacttaagattaacttccacggatattgaaaatctgatccgtgaaaaaattacaggaaatgatctctgcatcatcaacaatcagtcgataaaacaaggcaaacttcctctattattcctgaaaatggcagatgaaaatctgtttgttctagacagccggaaaacagccgaaaaaaccattatgaacgtagaacttctgaaggatgaatacaaactgacgaatctttggtttgtgctgaataaagaaggctataacccgagtttaatgacctctattaaaagttttataaacagaaaaagatcgtgaaaaagcttacagaaatatttcgcagacccacatctctggttttcgcagaccagttgattttcagcggaacaaattttcttctgacgtttttacttgcccgaaaactgaacatttcagattttggtctgttctcgtctgtgcttttggtgacgtatcttttggtaggcatctgcaacgccattgtagtgcagcctttccagattctggcagccaaagaattcaccagaaaatcgctgggctttgtttttcaggcttcagtagttttaataatgattttctctgccttactgttgatggctaaatttctgcccgtttctgcactggcgttttttaaagataatctattggcgatcatcgcttttgcggcagcctacgtttttcaggatttcctgagaaaggttctgcttacgatagaccgcatacaattggtgctttttatcgacagcatcttccttcttgtttttcctttaatctggtttgaaaacagtcttgatttaggaaaaagtcttctgatcattgctatcgtcaacgccattgcttccattcccggagtttggtattgtgtgaaaaatgcagaattcagtttgaaaaatgctaccctttttcattatcatgttacagaaggaaagtggcttttgagcgcttctatagttcaatggttttccagtaatttcttcacgctcgttgccggaatttacttaggagttaatgctttaggagcattaaggctggttcagtcgtttttcggggttattaatgtcattcttcagaccgttgaaaattattaccttccgaaaacagcccagcttcattatcaggataaaaaagaagaaaaaaaatcactgcttttcagtatgtcgaaaggaatgatggctttaggaatcttaatcatcggtttctttattttttcggaacctttaattacgttattgggcggagaacaatataagcagtatggttttgtgattaaactggtttcagttttatatatcgtgattttgtacagctatcctacccgactttccatcagagttttagaacagaataaagctttttttacaggatactgcatttcgtttgtgttttcattactcagttttcattttttacttaaatacggagcactttacggcgcagtggcaggacttgtaatcaaccagattctaatgatcgtgtactggaaaattttacttaacagaaaacagatttcggtatgggcatagtacatttgatattgggaaaagcaaatcctgaaaaaatgaacggcgtgaataaagttgtgtacaacatcgcgaccaaacaggccgaaaacaggcaggatgtagaagtctggggaatctctgaaaacacggagatcaattaccccgaaagaaactttaaaacgaagatttttaaacggaaaaaaaatcctttttccattcctgaagatcttcagaaagaaattataaacagcagcggatctacggtttttcatcttcacggcggatggattcctgtattttcgtctttaagcagatttttgcggaaacacaaattcaattatattattacgccacacggagcgtacaacgcggtcgcaatgcagaaaagcatgattaccaaaaagctttacttcgagctatttgaaaaagcggtcatcaaaaatgctgcaaaaattcattgcattggcgaaagcgaaatggagggtttacagtcgatttttccaacccaaaaaggcactttaattccatacggttttgaaagagtaaaagaagacttttctttcagttcccaaaaggaaagtctgattttcggatttgttggacggctggatatgtacacaaaaggtctggatctgcttgtggaaagttttgctgaattttctaaagcggatccttattctgaattgtggattgtgggcgacagcgacgagaaagcgaagctgcaacaaaagataaaatcattgggaattgagaataaaacaatacttttcggaagcaaatttggcgaagaaaaaaacgatctcctgaaaaagatggacgtttttgtgcatccctcaagaaacgaaggattgccggtttccgtaatcgaagcggcaaatttcgggaaaccctgtattgttaccaaaaacaccaacattggctatcttgttgaacaatacaatgcgggaatcaatattccgttgcctcagacaacactccttaccaaagcatttttcgacatttccaaaatctggaaagaccggcagaactatgaaaagatctgtggaaatgcggtaaaaatggtagaagaagcgtttgactggaacaacattcttgatgaaatgaataccaaactctacaactgctgaaatggaaacgttacctcttcatcatcagcaatttcttaaaaagctcaacaaccagctatttattattctgctgcttatggtggcgtgtttttttacgtggagcgaaaatgtaaacattacacgagccatcaaagtagtcggaagaatgggcgtgatgatctcttctattctcatttattttaaaatcataagatacggaagcatcaattctttagaatacaaaaatatattttcgccgattttatacatctgttatttaattttgggatttatctcattttcctggagtaccaatccgggattcagtgctttgcagtggtttatgaccttccagagctttgtttttgcttattttttcgtaaaaagtctcaaagttttagatgtttattttgaaggtcacaacatcagactctaccatcttctgggaaataccgttttcgttctacaactggttttcgtgatcgggatgtgggtagctccggatatatttttccggcttacagacggtggtgaagaagccagactgggcggaacaatgatgaacccgaatgaactcggaatgcttgccggagtgggttctgcatgtcttatttttgatctgtaccgctttaaaaagaaagtctggacgatcataaaaattcttgttattttgtatgctttattcatgaccggatcgagatcttctcttatcggatttttgctgatcgtgttcttccatattaaccagaccaaaaagaaaaccctgaaatttgccattattgcgcttgttgccatggttacacctttcgcagtgtacagcgttattctgaaaggcggtgatcaggaaaggctggaagagatcatgagtcttacgggaagacttccgttttggcaggctttaattacggaaggtttacccagagaaccgcttttaggctttggctttatgaggatcgattataaagagtttttccagagcgctcatacgtatccgggaaaaatgacgcacaatacttttatgcaggttctcatgaatcttggattcatcgggtttaccattgttctttttcaggtattttttaccgtaaaatccatactgtctgaacagaaggaactgaaactgatgctcatcgggattcttattcctatcgtgatcaattcctttacagaatttggaattttcggggaaagtaattatgggatcatgttctatcagatcattatattttccattgctttccgcaacaacaatcatcttacaaggttgcagaaaatcattcttaagaaaaaaagaccggagttactgccggactaaatttccacagaacagtattttttccatattttggaatttaaatttaattaaaaaattaataactaattaattatcagtattttaattttttggcagatatttttatactattttggtatatcaataatcatcatgaaaacattatttagaaatacagggtacaaattgtttacacagcaggaagagaacagcaagaaaatctctttttcgtacatcaaaaatcctgacggaacagtaaggtggttttggaactcagattcctcaaagcctttatttctaaaattttacaatgcagccacaccgaaagcaaaacttttcgaggtattggtaaaaacggtttttgtactgcgtctacagaaaattgtttttaagaaagaagttctttattatgtaaaaaacagtgagccggtatttaatatcgaaaatgactgggcaatttttacaggaacagtaggcccaaacaataaggcacttctgttcagcggaggatatttttacaagatcgcggaaacagattctgccaaaaaactgattgccacagaaagtaaaaaccttagaaaaattatttctggcaatgtattgcaggttcccgaagcttcgatgattaacgaaaacattcttaaattatctgatatttcaaaaggcggaatgcgtgaaaattctttcacgaaaattcatgcggaagctttgaaaatgatttccgtacaccatgaaagaagcgtaaaaatctcggaatggaagtattttcagaaggtgaaagaacagtttttaagtgttgatgatgaaagaattccgaaaaacatcctccgaaagataaaagcaatcctgagacacaccaatgaagacgaaaacatcgatgttgccttttcgcacggagatttcacctcatggaactgttatgtaaaaaatgaaaagcttgctgtttatgactgggaattatcttccacagaaaaaccgaaagcgttcgatttctttcattttatcattcagaacggaattttaatccagaaaaaaagctggaaagaaatttatacagagattacagaaaaaaataaaatgacattccggttcagcgaagaagaccttcagaaatatttaaaattttatcttctgacgaacacgttgtcttaccttaccatttatgcggcacaggaagaatggcatatacagattcactggctgttacaaacttggaacgaagccttaaatgttattcttaaagactactctaccgaaagagaactcgtaattttagatactttcgatgcgctttaccataccgattatgcggctttgaaatttcacaacgaagaaccggaaaagctgaaactgaattctgatattgatctgatcatttcttctgataacgcccagaaattagtcagttatttatccggacacagtctcgtacagaaagtttcaacggtgaagaaatcttttatgcagacggtaagaatcgttacgcttcaaaacgaaattcttaatctggatcttattcatcaggtgaaatggaagcatatacagatcatggaggtttcaaaaatcattgaaaacagaagaaaaaacagatttggcgtttataaagtttcagaaaaagacactgcccgatttattgatctgttttacagcctgaacgatgcagaaattcctgaaacgtatgagaaatttgtttcagaacatttaaaatcaaacaaaataaccgacagagaacttaccattaaaaccctgaaaatgaaaaacgaaaacagaggattcagttattttaaaaatattgttcattatttaaaagattcgtttgcagaaaaaggattcatcatcacattcagcggtgtggacggagccggaaaatctaccgtgatctcggaagtttccgaacttattgaaaaacgttacagaagacctgtaaaagttctgagacacagaccttccctgcttccgatcctgagtgtatggaccaaaggaaacgaaaaagcacatgaggacgcggtaaactctttacccagacagggaaacaacaaaaactccctttcttccttattacgattcggatattattatacagattatattttaggacagtttgttatttacacaaaatatgttttgaggggaaaaatagttttatacgacaggtattatttcgattttattgccgatgcaagaagaagcaacattcagcttccgaaatccgtaacggagacaggatatcatttcctgatgaagccggaattcaacttcttcctgtatgctgcgcctgaaaaaatacttagcagaaaaaaagaactttcgtatcactcgatttgcgaccttacttcagaatacagttcccttttctctaaactggaaagaaaaaaccagagagtgaagtacttagcaatcgaaaacaatgatcttgatgtgacattaggaacgatcatgaacacaataatcacagagagatgaaaaagcttgtcgtaaaaatcataaaactaagaagtccctactttactatagatgatgatctgaactccggagcggttttgcagtttatctggatccagctctggagcatcatcagaggtttcaggatgcttctctctttcagaaatcccaaaggaatgcttttaggcaaaagagtaagtttctttaatgtttctaaaataaaatggggaaagtttctgcgtctgggaaatgatgtgtatgtttctgcccttgcaaaacacggaattgaatttggagacaatgtatcgataggcgctttcagcagagtaattgtttccacctcttttaacaatatcggagaaaaaataaaaataggaaacaatgtcgggatcggagaatttgcttatctcggaggttccggaggtctggaaatcggagacgaatgcattgtaggacaatatctgagctgtcaccccgaaaatcataattatgaagatcctgaaacatcaatccggcttcagggcgttaacagaaaaggaataaaaatcggaaaaaactgctggatcggaagtaaagtaacgattctggacggtgtggaaatcggagacggatgtattctggctgcaggaagtgtgattacgaaatcttttccccaaaacagcattatcggcggagttcccgctaaacttttaaaaacaagaacccatgaaaaccaatcagacgatacttgcaacgtgctacgccatcaatccgtataaaggatcggaagatgcgatgggatggaattttgtgtatcagatcgccagatttcgtaaagtttttgttgtaacgagagaaaacaataaaacacatattgaaaaatacatgaaggaaaatcctgatccgttatatcagaacatgaatttcctttattttgatcttccctactggatgcgtttctggaaaaagggaggtcgcggtgcacttctgtattattatctatggcaacgaggcattgtttcatttgtaaaaaaacagaaggtggattttgacattgcccacaatgtgaattttcataacgactggacgccaagttttttatggaaattaaaaaagcctttggtttggggacctgtaggacatcaccctctcattcctaaacaatatctgaaagattattcccaaaaatatttccttaaagaccgtttaacctggatggtaaaaaactttttctggaaactttcgccttccttgaaaaaaaccgtgaagcattctaatcacatctggtgtatgaacagcggtgttccggataagcttaaacttaaaaaagatcagtattcgctttatccttctgttgcttcggaagatttttatcaaaaagatgaagtggcgataaaatcggattttgcagtaatcagcgtaggaagatttgttccgttgaaaggttttgatctcacgatccgttcattcattcagtttatcagtcggctttctgaagaagaaaaagcgaaatgtaagttaattttggtgggaaccggcgaacaaaagcagttttacaaagatttaattcagcaaaataatgctgaaaattatattgaaatcattgaatggatcgaccgcagagaactgatgaaaatgtatgaacaagcttcggtttttctttttccgtctcacgaaggagcaggaatggtggttccggaagcactttctttcggacttccggttgtctgcctccaaaatgaaggccccggagaatttattaccgaaaaatgcggttttactgttccacagcaggaatataatcaaacggtaacggaattgagcgatgctttaatgaaattattttcagacaaagatcttcagcaaaaaatgagcatcgaagccagaaaacattaccttgaccgattttcctgggaaataagaggcgatcatctcaatacaatctataaccaaatttagccatgaaaagaattgtctctgttcatcttctgaatgattacagcggaagcccgaaagttctgatgcagcttctgaaatcctggacaaaaaacaggatggatgcgcatctttttacttcaggcggaagaaagggttttttgtctgatattcccaaggtgaaaaatcatctgttctggtatcgcttttcatccaacgctctcgtaagaattctcaatttctttctgagtcagttttttctgatgattaaattgctctttttccttaaaaaaagtgatcttgtttacatcaacacggttttgcctttcggggcggcaattgcaggaaagctgagaggctgtaaaattatttatcatattcatgaaacttcggtaaagccaaaaatatttaaaaattttcttttcggaacagcaaaaatgactgccgataaaattgtttttgtttcggaatatcttctgaaacaggaatctttaattaacaatcaggaattgctgtacaatgttctggaaagcgattttgccgagaaagcagaccgtttccgaaatgtggaaaaagaaattcctgtggttttaatgatctgttctttaaaagtttacaaaggagttgacgaatttctggaattagccaaaaaaaatccttcttacattttcaaacttgtggtgaatgcgacggaaaaggaaattcaggagtattttaaaggcagagaaattccaaaacagcttataatttatcctacgcaaacggacacccatcctttttatcaggaagccagtatcattcttaatctctcccatcctgatctttgggtggaaacattcggacttacgattctggaaggaatgcgttacggcttacctgcgatcgttgcgcctttaggaggcgttacagagcttgttgaagaccataaaaacggttttttaatcgattctaaaaacacaaatgaactttctgaaaaattaaactacattttgaacgatccatcggtctataaatccttcagtgaggcttcttacgagaaaagtcttctgttttccgaggcgtattttgagagaaaatctctggatataatttccaatttataatccattttccagattatggaaattcggcacattttcattaaattataaatatctaattatcaatattttatgcaaattttacgatttggaacacaaatagtcataatatgttaaaataaaataattatgaagacaaaagtagcaattataggaacggtaggtctgcctgcaaaatacggaggcttcgaaaccttaactgctcatcttgtggaagagctttccgatacctacgattttacggtatactgctcttcaaaaaaatacagcaaggaagaaagaatcgaaagctggaaaggggcaaaactgaagtatcttcctttagatgccaacggaatccagagtattccttacgatacatggtctatttttcatgctttattccgaagtgatgttcttctgattttaggcgttgccggagcgtggcttttaccattagtgaaattattcaccaataaaagaattattatttccatcgatggaattgaatggaaaagagacaaatggtctgttcctgcaaaattatatctttggtgggcggaaaaactggcggtaaagttttctcatattgatatttcggataacgaatctattcaggattatacttctgtacgctataaaacaataagccgcgttattgaatacggagcggatcatacgaaaataaaccgtgtcccgtctgctgaaaatcttgaaaaatatcctttcctgaatgaagaatatgtggtaaaagtatgcagaattgaacctgaaaatcatgtccatacgattttaaaagtattcagcacgcttcctgagcgcaagttggttttggtaggaaactggaacaacagcgagtacggagcaaatctgaaagagcagtattcaggatttaaaaacattattcttcttgatcctatctatgaacaggaaaccattgatctgatccgcggaaatgcttctctttacattcacgggcattctgcgggaggaaccaatccttcgcttgtggaagccatgtttttaggtctgccaatcatcagcaacggcgtttcttacaatagaacgacaaccgagaatcaggctttttatttctcgaatgaaaatgaacttaaaagtattctggaggaggtaagcaaagaagatttggaactctgcgccggaacaatgaagaaaatagcggaaagaagatatacctggaaaagaatcgcaaaaaaatacagtcagcttatcgaagaaacctttactatcagcaagaaaaccaatgttatgcccagaatctctgaaattgatgaggcaattctgaaaaagtacaatgtagagcatcttaagcacatcaaactattcaataactctaaataaactgctaaaaaacgaggctatgaaaaactttgtagaactttctatgtacggaattcttgcattcatcctttcgatgtgcgtcattccgctcatgagaatgattgcccagaaaattaagctggtggatgttcctaatgcaagaaaagtgcaccagactgctattccgctgatcggaggtcttgtgatcgggcttgttgtttttttgcttttatggatttctgatgacaaaagctggaaagatattcttccgatcatcattacttcctacattatgctttttgtgggaacgctggatgataaaacagacatcagagcgatctacaagttgggaatccagatttgtgtgagtgtaattattgcgacttcaggcatccggattaccactctttacggacttttcggaatccatgaaatgaatgtttattttcagtatatttttacagtacttatcattacaacggctgtaaatgcttttaatctgattgacggaattgacggtttggcaggaagtgttgcaggagtaggttttgctttgtttttcgttattgctttaattgaaggacatttcggactggcaagaataggactgcttttcgtgggaagtattgctgcttttttacggtataatttttctttgaagaacaaaatttttctgggaaattcgggttctttatttctgggatatttgttgatctgtctgggaatttacattacgaaattcgacagaggttcggaagagtttccttacggtattttctttattctttttgtattcacgattcctgtgattgattctgtgagagtgtatgcggatcgaatttcgagaggaaaatcgccattcaaggcggataaatcgcacattcatcatcatcttttacagttgggtctgtctcacaaaagaattaccttaacttttgttgttctgaatatcgtgacatttattgttcagtatgtgtttttcccaaactactctatttatacaacgcttatttcattctttgtcttcattttcatctttaaaattattaaagtgctgaatcttttccttacgtggaaaaagaatatcaaagacatggaaaattcataaaaccaaattttgatgtaaaaattattatttcgcccttatttacccttaataaaaagaatactccgtacagtaattgtccggagtatttgtttttatctgcttaaactgatgtaaagtttaactgtgttgacttattaattcagcttgaaaaagaaaaacgcaactgccgcccactcttttttaattccgcttgcataaccgatggtggaatggctgccattttctaccgttccgttgtctttaatatatccaatggttgagtggctgctgttttccacggttccgtccttttttacgtagcctacggtagaactgtttttgttctgtatggtaccgtcacttttaatataaccgatggtagaatggctgctgttttcgatagttccgttgcttgtaatataacctactgtggaatggctgctgttttcaatggttccgttgcttttgatgtatcctgctgtgctgcggcttcccgattctatggtttgtgcacttaaaagagataagttaaacaaaacagcacaaacgaatagtgtttttttcatggtttttaaaatttttaattttccgaaatataggaagtttttattgaaaatgaaataccacaggaatttcagaagaaaaactgaaattatataatcctaaaaattacctccaagaattcaaaacatactttgtaaagttcatttccatgtcttttattcggtcttcgagagctgtaattccttttgtaagatattcctttttttcaggatcagtcagcgtatggattgcatcaaaacccggtgccggagcagaaatcggaacagacaattcaatggtgtcgccgttttcataaatataataataccagtcttttttttctaaaaggtttttcatgattattttttattggtcttaaaacattaaaaaataatttccttcattcagatctaaccatctatgatctgattttctcagcctcttcaatattgtatctaatccttttatcatcatttaataaggaactgaaaatctcaaaatattcttcaaacctgtgtttatcgtaatgaacgataaccggaaaaagctgacttgcctgataatattttttattcctcaaagcacttttcatcgcctcttcaatttctttcagtagcggttcgcagtcttttttcaacagaaaatctttcagacaggattcgaaaaacctatccccgtaaatgcttaagaaatgttttacataaggatataattcctgttcttcttttccattgagtgtcgaaatgtataatgcatccacgataacatcatacacattatcttcattataaattctgtgaggttcaaagctgtgtttttcatcccatttttcagaaataaagcgatcgagatgtgcaaatccttccggaattgcccaagcaaccaaaataagcattgcctgataagaaatgtagggatttttatgttgaagcagatgtttcagcttttcgacacggttttcgtcggttttgccgatgagctgtacttctgtgagatcataaccttcttcaccatcttcgctgtaatagtacagcgtatcatatatttcgttttccaattcttcttaattaaataatttatttcagttaaaatgtccgtaattttaagagttccaaatccggatgtcttctaaaaaaagcatatatcttcccggttgatattcgccgtaagaaaataaataaatcaaatcatttttcttaagataatatacttccagacctttttcagaaatgtatttttcaataaaattattgatctgtttaaagccgttttcttccaccatcagatcaaaactttcacgatctgtctcccttttcagttcttttaacggatggtcataaaaatcgaccaacctgattttctgccgattaacttcaaacactttgtttacacattctctttcatctccatcaaacagaagctgtctgaaactttcggatgatgaatgataatcaaatgctcctccgaagatatcaatcaacaattttgcatattcatcattttcgtaatcgaagtttttcatcgccaaatgtcctaaagaataccttttgtataattcgttttcaaaaaaaacaatattattctttactaatttttcatcaatatcaagtaattgattatagatggaatgatacatgggaatttcaggagataattttattagttcctccgttttctgtatcgccagattaagggtatctctgtacgattttttcattttttcactgttcaggcggatgtacattttgtttgtttttttaattcagtgatgtgagtgatgtttctaaaattatgtgtctttagctaaaagcattcaggtttttgggatcaagagtatacttttcataaaatacaattgacttttattccgtttattattttgaaccaaaatggaaagtttctcattcattttcttcgtcgtcttcatcctcaaatcgatcatcttcttccaaaactttttcaacccatattatcgttttctgcgcttttggatcatcttttccgataactattagagcacgtaaaacattatcggcaataaaagcatcaaaataaccatccgattcatattcatcttcgacaatatcaataagattttcgattatagcagctttattttctatactccataccgattccaaatatttccaggcttcacggaaaaaatacagcacagaagtaaattcatcgtaatcaaaaatatcatcattcaggtaatttgtaatatcatcctgaatggaagcaatttcctcggaatgaaaaggagccagttcaccaatcaggatatagatggatctataaggtctgaacattccgtaattacgattcaaaccatattgaaccgtattaataatctgaccgatggttattggagaaagttttgtttcaaacttactatcacacaagtatttaaaaatatcatacagttttctttcatcctgttcttttacagaagctaaaacctcatcaatctttttattaagttcttcgttaatttgattcgccatattttattatgcatctgaaattacaaggaagccccgtccaaaaaatcagaacgggcttacaatggtttattgttttttaaaaaggaaacaaaggaaccagcttcattccttccgaattcggcgacgttttgatgtattctttctgatacgttaacggtacaaggttcctttctccgctttctttccacatctgcatcatttcttctcttgctgcctttgcaaccgcattgtttttacttcttatttttgttgttttcagccatttgttttcaaaaggttttacggaaatcaacaaaatctcttctaaattcagctttaatttctgaggaacggtatttgactgcatacccagcaaaacaccaaagctttcatttttcataaaatcttttgaagtaataaagcttaatgcattatgattggcttcattttctctgtttacccagagttcaatattgtcttcggtaaattccagagatgtttcaccgaatttctccattaatgctttaaaatcaccatgcccgattgcaatttgagaagtactgtttacgagggcaacagcaaaatgcttatgaatgatttcgtacggtatattgccgtgaaattccatgtaaaattcggctccgattccgttatactgagaattttgaccataataaaagttttcgtaaggatctgaaagcccgtctgtaatcaatatcgtagattccggtgcataaataaccctcattttgcatgaattgtggtaagagcttcctccaggccatgaatgatctctaaaaccgcccactcgcagataaataatccgttcatccaatttccctagagatctgaaaaattcatgcctcatttctatgctgtctgttgtcgcttttttctgcttttcgtattccggactaaactctatttgagaaactcttaaaggttcaaatccgtattcttcaactgcaggatccgactgtacgttgagattaccgtcttcacagctaaaaaaaagactatctattttattttccaactgatgataaatggaaaggatttctttacttccgccaaaatgcccgaaagacctcattttatcgttgtaatgatatgtggaatctataaacatcccgatttcgtccgcttctttttttaaatggatcaaagcttccgctttcagaaaaacattatcattttcgctgtattttccggctctgtcctccgtttcctttttaatatcttccaaaaacatagggatgctgtatctttcagctttaacaggttctccttttttaaaagtgaatttcaccttagaatgtaccggaaaaaagtaaataagatcagaataatcataatttcgaaatttatccagatgttcattcatctcttccttatcgtattctcctacatggaaatcatcgtaaaaaactccattttcataaaaataaatccccgtgttggatgaacttccgtattgatttctgtatgcttcataatgataggtacgtccttcaataagcaattcgttcatttcttcagaaagtctggcaatcaatttttgagcttcttctgaacttaaatagttgtttttcatgttttttaaatattagtttttttaaaacgttggtatagataatgtttccggataagggaaacggtcttttgtataaataagctgaataatggctcttaaatatatactgttgctgcgcattttgcagtgtgtaaaggcaattgcccatcctgcgctgagattattgatcattattttttcgttccaaaagctgaaggcatcaatatctcctgaatgattactgcaaatctgggtaaattcagaatgagaaagaacgtatacttcatcttcttcttcaataaaaaagttttgctctccgtaaagtctgtagcctttaaaatcgttcatagaaatatccatcacctcaccctttacatcttcgctgctttctgtggttaaagcgataacggagccattgttgatgagcggaagaattccgtcgggataattataactgaatatattgtctgcaaagtactttttaagaccttttttagaacagataagcaaaacaccactggtatctttttcgaattttttttgcatttttagtttttaaaatatgagtctgtttaaactttatttaaccacaaaagtcacaaaagatgactaaacttttatttaaagttgatcattatcaatgaaaaagttcacaatagtttttaaaaatctttgatttttattcttttgagcgctttgattattaatgaaattcgctttaacattgtcttttgtgccttttgtggttaattctgaaattagtttaaacaacttttatattagtcaacaattaggaataattgttattttttttaaatcccaaattcatcttctttccagataaaaaacataacactcggcaatgcataataagccgctatttcgggacgatccagttgtgctttgagatccagtttgtaattttttactgctaaattcacttcttttaaattgggtaaagtattcagaactttcacatctgtaacgttggttttgtataaatccagacgctccagcttttttaaaggctccaaaccggaaatatcatccagttcttcgctttctaaaaatgccagccatttcaaattcggaaacttatacatttccttcaaatcaatattattctgaatacgcgataaatctaatttttccagaagtggcatgattgcaaaggaagaaaaatctgtgatgtcactgttatacaaatccagaacctttagctttttcaaaggttttaaatatacttttccagatcgttgaaggctaaggaattccaaatttggaaaacggctaaatcctttcatttcgtgattgtttccagataatttcagtcttttcaaagattccatttggggaaatgttctaagatcgaactttttatcattgataatttggagagattttaaacgttttaaattttcaaatccgataaactttgtcctcgaattaaaaattaaaaactccagctttttcagatgtcccaaatcgaaaatatgctttgtttttgctatgctaatatccagctttctcaattttttcaactgcataatagatcttcccgtttttgcagaaatttcataacccaattttaaggtttccagcgaagtaaattgtccgatgggataatctggagcttttttatccatttcttcgtcttcataaaaatccagactcttcagctgatcttttaacggaagtaattttgagaaattttttatctctttactctctcttgagaaacagagtgattcaaaacttttcaaattaacaaaagacctgaaatatttatgttttttaatctcagaatctctcatcttcactttttgaatctgattggcaataggcagaaaagcatcgacataaaattcagatttatcaaatgaaagagttttaaccatttcaaaattttcaagatcctttatttttttcactttaaaatcagtaaagcttaattcattgatataatttctgagtgagactgcattttttaaacgaaatggtttttccgccttactgaaatgacaggtaatttctttattgaaaggattttctaattgactttcatctttaacaagtgtatttgtatcaatttgaatctttttaagcttttcaaattcagagatccctttaaagtttcctattttacaattttcaaaatcaattcttcctacagattttttaaatggtataaaagaaatatcttcaaatttggagttgaaaatatcaatcatgtagattgatttctcttttaccttggtagggttacaagtaaaagttatactgtcgagatgtagtgaataaagcccttttatattattgatttcctgaatattatcaatatgacaattcttaataaaaagatgcttatgccctttaccggatgacgatatatgaaaactgttaaaacaacctgcatcaaaggtcatatttgaaaatcggatttcataaggaaatcctctggttacattacattcattgtttctgaaagtcacattatccagactaaaactggaacaactctctatttttaacaattcggaaaaattggcaatagtacagttgctaagttttacttttgttactttaacaagatacggtaaaaacttagaaaaatcctcaatatcgacgtctttgaggtgtagatattgaagtaagttatattttaagtagtcttccggttttattcctaagatttcctcaattttctgcgtttcttcatcaagaaccgttgatctatttatttgattttctacattttcagtaatcatcgtttacatgtttttatggttattatttaaatgaaaaattttctattcagcggttaagaagtttttaataatggtctcacacatctgcttcagcaattacattaatctcaaatttcaataaaaagatcaccggtggatttaatgtacaacttttcagctcaatagaattctgcaaataaagcacaaaagagagtaccaacaaaacggaaaaagaaaatttaacaactatgattctgcagtgatccgaatgatccaagaattttaaacttcaggcataaaaaaaaccttcaaaataaatttgaaggttttttgcggagagtgagggattcgaacccccggacctgttacagtcaacagttttcaagactgccgcaatcgaccactctgccaactctccagaaactccgattatatcgttgttttcagtggtgcaaatatagaacgtttttgaattctgacaaaatattttaaaataaattttaacaaaaattaataataaactaaaaatcagatgaattattttaaaaaaaccttacaattagggctgtgtaaaaatatttgcctgtattgttaacaaaaaaaaacgcatcccgaaagatgcgttgcatattttaatatgtaatccgaagattaatgcaattctgcaagatacttctctgcatccatggctgccatacaaccgcttcccgcagctgtaatcgcctgtctgtaaatatgatcctgaacatctcccgcagcaaaaactcccggaagatttgttcttgaagaacctttttctgttacaatatatccgttttcatccagatcaatctgtcccacaaaaatatctgtattcggtttgtgaccaatggcaataaagattccatgaacatcgattgtagatttttcctgagtctgattattgatgaccactgctctttctacaaggttattttctccttcaataccaattaactcgtggtggaatttcacttcaatattgggcgtattattcactctgtgaaccattgctttggaagctctgaattcatcttttcttaccagcatggttactttgttcaccagctttgcaagataagttgcttcttctgctgcggtatctcctgctcctaccaccacaacatcttttcctctgtagaaaaatccgtcgcacgttgcacacgcggaaactcctcctccattatattttttttcgtcatcaagacctaaatatttcgcagtagctccggtagaaataatcacagttctggcaaaaatttctttatttcctgcgtacagtttatgaactcctcctacttcttttgaaaattcaactttagtaatcatttcataatgtacttttgtttcgaatctttcagcctgcttctgcaaatccatcatcatttcaggacctgtaattccgttcggatatcccggaaagttgtcgacttcagtagttgtagtcaattgtccgcccggctccagacctgtgtacagttcaggttttaagtctgctcttgctgcataaattgccgctgtgaaaccagaaggtccagatccaacgatcacacaatctaaaatgttttgctccatattctgcttttcaaaaaaatttaaaatttccgagtgctaatttcggaatttttactgtttatttaaagttattttaatgatagttgtcaatatctaatatgttgaatttcgatagtagctgttagacattggttgtccgttgatggtaaaattaaggtcaatcaacaaacaacaattatcaaaatcatactttcattttaattttatcgacatttataattttgtaaaccaattctttaatcagttctgcttcgctcatatttactgcgcccaatccttttcctttcatatcgaattctcttaaaattgaaatgattctggttgcatgttttaaaggatataatcttgccgactctgcataatcttttataaaataaggatttacacccatttgtgcggcaattgtctgaggcggctgaccaatcatggtgttgtaaataataacattggaaaagtaattgtacaaacttgccaacatcatcacgaaaggattgtttttagggtttttgcccataaaatgtgcaattttaaatgctgcgttggcattttttgttcctaaagctttctgtaattcaaaaacgttgtattctttgctgattccgatgtggttttcgatgatggttccgtctaaaatctcgccgtctttcaggatgattttcagtttattcagctcattggcaattcttgaaaggtcgtttcctaaatattccgctaaaagatgtgagatattgggagctgtttttatttttagtgcggcacattcgtctgcaatccatttgggaaggttgttttcgcggattgattcgcttaaaaataatgctttcgctttttctaaagatttggtgactttctttcggctgtctaattttttgtgtttgtgcgcaaaaaccagaacggtggacggaacaggattctgaacgtacatttccaaagcattgctttcgctttcagcgagtcttaaatcctgcgcttcttttacaatgattacctgtttgtcgcccatcatgggaaactgtctcgccaaagaaagaacttcctgataagtggtatctttgccatagactacggtttggttgaatgctttttcatcttccgtcagaaagtcgtgttcgatagcttttacagcaagatctataaagtagggttcttctccgtgaaaaaaataaatcggtaaaacttctttatttttaatatttttgaggattaaatctaattctttcatcttataaatggaacttccaaaactgaattttcaggaaacttttgattttaaattcaagaaagacaaagataagttttttatttatgatttggttcgtaaaacttaccttttgctgactcctgaagagtgggtacgccaacactggatccattattatcttacggtaaaatcctactctgcttctgcattaattacggaaaaaaagattgttttaaatggtttaacgaagagggttgatcttttaattactgaaaaagcacagcctaaaattttaattgaatgcaaagctccgcaaattaaattaacggaaaaaacttttgagcagactgcaagatataattctgtgatcggagcgaaagagattgttctgacgaatggtttgcaacatattcatgcgtattatgagaatgagcagtatctattttataagccggagtgaggttgagggtaaggttaaggctaagatttaggttaaattggttgtgaaaaattaaatgatattatattttattggttctgagttatttttagtaatttaaactctggatttattttcaataattaaaaatacgatggttggtcaatatgaaaggatccgtacaggaaaatcttaacttttgggataaataactgaaattcaaaatttttattgattaaatcttaataagaattggttgaatttggcagaagtattgatggtattgttgcagtattgataaaacagaccgacatttagccccgattgagcggcgtgtctgagctcttttctgtatttcggcggtggcttcgccaccgccgaaatacagaaaaagcgagtagcgaaagcgggaaacagctcctaaaaaaaattaaattacaaaatatgatacgttcacttttattgtcttcgtttttaatgacttcggtgactttttttggtcagaatctgaaacctgtcgcttatcaggacggcgcgcagaaacttaatggattggtaacttccattgcggggaaaaaacttcccggagttctgattcttcctgcgtggaaaggaattgatgatgaagcgaaaacagccgctgccgaacttgaaaaacagggctacgttgcttttattgcagatatttatggggagggaaatattccgaccaatatggatacggctgcgaaaaattcgggatattacaaaaaaaattatgaagcgtaccagaaaaggatttcgcttgcgctggaagaactgaaaaaaaacggtgcaattcctgaaaaaattgcggttatcggctattgtttcggaggaacgggagctttggagtcagcgaggggaaatcttcctgtggtgggcgttgtttctatccacggaagcatcggaaaggatcaggcgagaaaaaacggaccgatctcgacaaaaattctggtggaaaatcctgccgatgacagaggggtaagtccagaggattacaataatctggtgaaggaaatgaatgacggaaatgcggactggcaaatcatcacgtatgcacattccaagcatacttttaccgatccgaaatcgccggattacaacgaagtgatggcaaaaagagcgtggaatcacacgctgatgtttttgaaagaacttctgaaataattataatcctcataaaaaacgacctcccaattttagaggtcgttttctttatagctcgcttgtagtattgcagtcagaacaccagaaatattcggtttctttatctttaagctttgtttttgttttctttccacagttttcgcagatgtatttctcactttcgttttcctttgcttcataatcacaattgaaacagctccaaaccgttacatgagactttccgttgataaaccacgtaaaggaattttctttacatttaggacaaatttgtagcgccatactttattcttctctgtttacaagatccatagaaaaagcaggaaggcagatggcaacgtattcacattcttctgaaaacggattgctgtatcgcactcttgctcctttttcaattaaaatactttgtcctttttctaagacaacaatttcgccgtcaatttcaaattgcttttttcctgaaataattaaggtgaattcatcaaattcgggagtctgatgcggctcgctccagttgggcggcgcaaccatgtgtgcgatggaaatattggaatttcctgtggagtttccccaatgttcttcaatgagttttccgtctgtggttggaacaacgaatggggattgctgaattttatatttcttcatattatttatttttttattcttttgaacactaagtaaaccaagttttttactagtgatcgctttttagtttcacaaagccggttcatttgtaaaagttaacagaggttttaatttagctaaaagtctgcctaaacttttatttaaccgcaaaaggcacaaaagatgaactaacttttatttaaagttgatcattataaatcaaaaaggtaacaatagttttaaaaatctttgctttttattcttttgagcgctttgattattatggaaattcactttaacattatcttttgtcccttttgcggtttattctgaaattagcttaaacaagttttaaaaatgattctcctttttaatttcgtatacaaagttagttctggtcggttctccgaaatacgcgacttcctgctctgcgattttctttccgcccagtctttccaaggcaatctgggaacggtaattttctttcccgatatgaaaatgaacggtatctacaaactgaaaaatgtaatcgagcattaattttttaatctgcggattgattccttttccccacgattttgttccgtaaaatgtgtagccgataaaaatactgttctttgcttcatcataatcataaaaacggctgcttcccaaaacggctcctgtttctttttcaataattttaaaggcacctttgctttctattgctcctctgaaaaaattttcgaaaacttctcttttgtagcggtctttattgggatgttgttcccagactttaggatcggaagccacttcgtataaagactcaaaatccccttgttgcaaggggattaactgatatttttcgttttctaaaacagtctgaatagaaaagttcatgtttagccttttgtttttgccgcgtcagactcgatttttttgatttccttcaacttgtctgcaattttacttacggcttccggacttgaaggttttaaagcgacttccgcctgagacatgtcccatttcaatacgagatttgcagagttttcgcctgtcggatttaatgtaatttcgaaccattcctgcttatctgctaatttattaaccggaaccgtaacatctacaacgtcctgttttgcatcatacgtataagctccccactgctggaaatctttgtttaagattactttccattctttttctgtcggaacgatgaataatccataagttcctgccggaacaatttttccgccgaagtttacagactgtccgaatgtaattttggtggatgaattcgctcccgctctccaaacctgtccgtaaggaaccagttctccgaagattttacgtcctttcacacccggtcttccgtaatcgatcgtgattttagacattgaaaactgctgctctactttctggcgcggactcgccgcaggaaccgaataatcctgtgcaaaactgaaaactgaagccgatatacaaatcgcaaataataactttttcacttttttaaattttgcctaaaattacgaaattgaatataaaaatcattttctgccatgataaaatttgttaaaatgccatttttcattccttgtttaagtaagctttcttattgtttcaaccggttttaagtttaaattcaaaagatattttatagagctattttcagaataatcaaaagtttagataagtttcaatcgttaatgaaaattaattcggcattgctttccatttatgcagaacggaagtatacagatacataaagatgaatccgcaggctaaaataatatagctgagattgaattctaatgttttgataattgtaggacagttataagacataacattgatctgttcacagtttctttcctgatggatattaatgataaaaaagatcagaaaaacaaaaagaacaaagccattcatcgagatgttaatgagaattgaggctataatttttttaagacttttcatcattacaattggaagcagtaaaattatcagtcctataaaaaagacaaaataggaaacaaaaaattcaattctaattctaccgcttgaagcagaaaataacactgttaccagaacaactgccaagaataaaacgcctgcactaatcacgctgaaaagaagagatttaagccctgttattctgaagctgaaaataatagtagagaggaaaaatgcgatccagatgtaaatatgaatattctctgaaaagaaatccgtagattttataataactacattattcagaagattctgaagattgtatgaataatagtagtaatctgttgtgttattcttaaaatattctgccggagaaagctggttatcaatatccggattaaagtctctgatctgaacggaatcatttatcacttcaccgtcaaccactgcagcgacagaatctgtaacagcttcggtatacacataatttccgtcttcgtccattggcggattatttacatcatattcttcacccggaaccggtttgtattttttaataaaatatcttacgttgaaatcattgggatgatagatcattttcacccagctttttgaatcaaggttattgttgattccgaattttttcgaaatatcaagaaaacttttcagcagcttttcaatttcagcaggattttttttgttaagcagatccgttgtaaatctgttgatttcgaatctcttctttttataagagtctttaagcatctgattgtatccgtcataaggcttttcaccggaatattgcatcctcaaataatcctttcctgaataatcatcactataaaatacatcagaaaaattataatacgttaaatccgtggtattgatgtaggatgacatatccacgacatcttttttgaaatagtaggttgcagagccttttttattttcttcatacgccagattcttttcggtttcacctgacgggaaaaggaaatctccgtatttatcttttttataaacggtttttgaatataagttatagaactgataaaccctgttatagtacacaaaatatttctgattccggtctattttattgatgtcggtctcgcaatacagatcgtaaaactttggaaaagttctgttatccaaagtataatgctcaagatcctgagaaagaaaagcattggctttattaataacattaatattttcagtcatttcctgatcgggatatttgtttttaataaacatcttgaaacccgtcatataagaaaaataaaaagtggtacctgcaaaaataataatgaagtactgaacaaactgcaggaacaatttcccttttgaagaaggataaaagttcttgaatgcgttatttttaaacatcataatcagccatcccaccatcatgagaacggaaataatgaggtggataaaaatcattccttcgcggaaatagtcatcttttacattcattttctgtaaagagacaggatctgcgtgagaaatataacctacgataaaaaagaaaatatgaagcactgcactcgccaaaagcatccatacaattctggtattccataccgttggatatttttcgagcagatattgattgattttatttattttttgcattttttgttgaatttgagaaaattagcttacgaaaaatcttctggttgaggaagaaatattacggatatacaccacattcattctggcagttccgagcgcggacatcaccgtatgaaactctgtatctgctgaaaaatgagcaacatacactcctccgttgaaattcagtttttcaagagggaaaccttcaaatgcttttaataaatcttctctggaatttgtggtatcaatttcgataatcagtccgtcattttcttcattcaccaattcagaattgtctttatactgtccgtttttcaggaaaataactttgtctgatattttctctacttcgtaaagctgctgtgaactcaaaatcaatgcaataggattattaaccgaatttgcaatcgattttaagtcttccagaataacctgctgcgccaaaacatccagattggcaagaggttcatccagtaataaaatttcaggttttctcagcagtgttctggctaattcaaaacgcattttgtagccggaagaaagttcgctccacttcagatgtttgtaattccaaagtccgagacgagcaatcatcattaaagttcgtgtttcattttcttcaggtttcacaccgtaatttgacagtacaaatttcaggttgtcctttaaacttccgtaccattttgcagttctctgcggaatgtaaaccagttttgtacggagatcgtattcatttttaggctcttcattgaaagaataattcaaatcaccttcattaaaagaaatttccttagcaaggatacgcagtaacgttgtttttccgtttccgttttcgcctactaagccataaacctgtcctttattcatttccacagaaaccggacccagcgaaaagcggttgcttccgtaggattttaaaatatttctcgctctcagtacagatttttccagcgattgttcttttaccggagttttttctattttctgaagaagattttttgatttttcgatgagctcatccgtatacgaaggaaactgttctttccagtcagttaatgcgacagcttctttgtagatctccatattctgagtatccatcgcacagtccagtaattttctaaatcctaaaacagtatctttattgtcgaaaaaatgatagacttcggctactctttgctggtgtttcgtcatttggtttcagagttgttaattttcaggttttaaagatataaaatttcttttccccacaattcttttggctcaaataaaaactaattttatttttatgtaaaattagaatcagatgttcaaaataatttcatcgcttttgttattatcttttttatcaaccattcaggctcaggaaatcattccgttcagaattacgaagcataacaacatcattgttaaaactttagtaaatgacaaagattctctggatctgatgtttcagattgctatggaagatgcgtccatttctccggatcggaaaagaaatgcagatcatattatttttaaagatgaaataagcgacggaaatacgataaaaatcggcaaaaagaaatatgaaaatattagatttttcgataatgaactgaccggtcatgaagcagacggaaaaatcggaaccggaatttttagaggaaaaatttttaaaatcgattatgataacagcagatttgtagtgtatgataaaatgccggatttaaatggctatcagtcagttacattacttttaaaaaatgaacagctttttattcctgcgaacagtatcattgaaaagcaaaatgtagaagcctattttcttcttcaatccggatattccggcgggattctctacagcaatgaatttgcagatggcaaacaactcgacaaaaagctgaaagtaaccggcgaaaaagcattgaaaaactcatccggacaaagcgttatcaccaaaaacggaattttgcctgttctgaaagtgggaaattttgttttaaaggatgtttcggcaggatttttcgcaggagaacttaaaattcagaaatccagctatttcggagcagatttactgaggaggttcaactggatttttgatgcggaaaggaataaagtttattttaaacctagcaaatattttaagaaagcttattataaaatgaattgagtaatatgttataaatttgtttaaaacaaaaagatggaatccgttaccttaaaaaatatcaatgaaattctgaaagatgcccctgaaaatattctggagagggttttaggctatatagaaggaattttagatgatgaaaaatctgaattcaagctttcggatgaacaaaaaaagagtcttcaaaaaataaaagaaagatcctaccaacaacatactgacattgatacttttcttaatgaaatgaattctaaatattataattatagtgaataataaacagagcagataatttttctttcaaaatcttaaaattttattgattcaaatctttctccagcttctccagatattgtgaccatgcactcgagcaaccaccaaaacattcaaattgcgggatcaagccttcatgcgtgaaaacaacttttgttttatcagcttctttgaaaatctcaaaacaaatttttgttccggtccattcgtccattttgtttacaaatgtgagtttgctttcgatcacttcccaaacaattttctcgtaaggatttacttctataagtcgttgaacggtgtgatgaactccatctccggcatcaaaaataaattcatcattcctattttcagatcttccggtaatgatttcattatgcagaccaatccaccagtttcggggattgattaaagtattaaaaacttcttcaggggattttgaagtggtgaacgtgtaagagaaattttgtactgacatcgttttgtgtttttatgaattttcaaaatcatatacttttctcaaagtatttttatctgcaatcatattgaaagtaatatttctgttaaattcataataaccaaaaatatagctttttgatttatcaataactttaattccgttaaatttttctattttttcaggattttgcaattcggcaaaaccaaatgtagtgataaaatcactcaatttttcggcttttatggagactgattttgcaaagggatctgaaagatatttcttattaaaatccacatcaagagataaagtctgaggaaaatgaccgcctgtttcggtataaaagaatttgagctttccacattttttacatttccataaatcagctccgttcatcggataagagcctaaaaaaatttctgaatcatttgaagatttaaattgcagatagcttaaatatccaaatttaccgtcgtaaatcttaaaaatcttttcataatctattaaaatattgtgcttgcagtgaatatctttaacaggatattcagcaaaaaattcattaatattttccaaaacaagtgaatcggaagcattatctaaatttttattttcactgctattctttaaaattgacgttattaattttttaaacataacattttgtgattatagaaaatgattagcaactacctaattttttttgatgaaatttggactaaaaattgaaaaaaaaggttttacgaatatatatcacaaagttttcagaattcagacatcacattagtcttttcctcatatacttttacggaatgtaatattaccttttttgagttctacttgtttatatctaaaatgatcaatatacccaaagtaccattctttgttttcataaacaaatgtcataggctgtggcagaagaggtctgtaatgatttccaacctgaggatatttataacttacaccgataagcaattcatctccatcttcgggattgtagtcaaaatcaaattcagcattattattcagagcttccataacaaattcagcagtaaggtcttgatcaagtttttctgaaggtctaataatctgccccataattctacgcttttcttcaaatgttaattcccggacagttttttctaatttccaataataaatctgcttattatattcttctttattgtcaaatattttaaacgattctatttctaagtttataatactatttaattcttgttcgttacaggtacaaaaagttatatattttttattctcacacatagtattagattatgctataaaaatctaatttagacattcttattattaaaacaaaaaacctcacaggttttaaaaacctgtgaggtttgatttatggtaaatcattaaaatttccgacaattacatcgtttccatcttaaagctcatactttcaatcactttcaagatcgcttcaaccgtatccatcgatgttaaacacggaacaccgttttccacgctcattcttctgatctggaaaccgtctctttccgattgtttccctttcgtcatcgtgttcacaacgtactgtacttttcctttctggatcaggtcgatcaggttgacactctcctccccgattttatatccgattttgcatggaattcctttttcttcgaagaatttcgctgttccttccgttgcccagattctgaaaccaacttcgtggaatcttgccgccagatcagccgcttcctgcttgtgtttatctgcaacggtgaacaaaattgacccgtgcatcggaacttttcttccagccgcaaccaatcctttgtacaaagctttttccagtgttgtatctttccccattacttctcccgtagacttcatttctggtcctaaagagatatctactttcgttaattttgagaaagagaacaccggaacttttacgaaaaccccttctttattgggaactaatccgctttcgtagcctaaatctttcaatttttgtcctaaaattgcttttgtagccagatttgccatcggaacatcggtaattttagataagaaaggaacggttctcgatgatcttgggtttacctcgattacatacacgtttccttcgaaaagtacgtactgtatgttcatcaatccgatcacatttaatcctttcgctaatcttttcgtgtaatcaaccaaagtatcgatttcgcttggtgaaatattctgtggaggatacactgcaattgaatctccggagtgaactcccgctctttcgatgtgttccataattcccggaatgattaccgtttcaccgtcgcagatcgcatcgatttccacttcttttcctaccatgtatttgtcgaccaaaacaggatgttcagggcttgcttccactgcattttccatgtagtgcgccagttctgtttccgtgtacacgatttccatggctcttcctcctaaaacgtagctcggacgaaccaacaccggataaccgatttcgttggcaatttttatcgcttcttcttttgaaaccgatgtttttcctaaaggctgcggaatctgcatttcctgaagcgctttttcgaacttgtctctgttttccgctctatccagatcttccagggaagttcccagaatctgaactccatgagcggctaatttatctgctaaattaattgctgtctgtcctccgaactgtacaaccactccttttggtttttccagttcgatgatgttcattacatcttcttccgttaaaggctcgaagtatagtttatctgaaatcgagaagtctgtagaaactgtttccgggttattgttgatgataatcgcttcgtaacccatttctttgatggcccaaactgaatgcaccgttgcgtaatcaaactcaacaccctgtccgattctgataggccctgaaccaagaacgatgattttttctttgtccgaaactacagattcgttttcttcttcgtacgttccgtagaaatagggtgtttcagattcgaattccgccgcgcaggtgtctaccattttatataccggcattactccgttttcttttctgaaattgaacacttcacgctcggtcacgttccagagaactgaaatatttacatctgcaaaacctagttttttagcttccagtaaaatttctttgctgaatttattttctgcgattgtcttttcgaaatcaatcagttttttgattttccagatgaagaatttatcaattttgctccattctacgatctgttcccagtcgtaccctcttcttaaagcatctccgatgatgaataatctttcgtcatcacaaactctgattcttctttcaatttcttcagccgttaaagctgctgcctgcttagtttttaaaccaatatgtttaattccggtttccagagaacggatggctttctgtaaagattcttcgaaatttcttccgattgccattacttcacccgtagctttcatctgggttgataatcttctgtctgctgtttcgaatttatcgaaagggaatcttgggaatttcgtgactacataatccaaagctggctcgaaacaagcgtatgtcttccctgtcaccggattcatgatttcatccagtgttaatcctaccgcaatcttcgcagcgatttttgcaatcggatatcctgttgcttttgatgctaaagcggatgatctcgaaactcttgggtttacttcgatgatataataatcgaatgaatgcggatctaaagccaactgtacgttacatcctccttcgattcctaatgctctgatgatttttagtgaagcgtttctcaacagttgatattctctgtctgaaagcgtctgagaaggcgccacaacgattgaatctcctgtgtgaactccaaccggatctatattttccatgttacaaaccacaatcgcgttgtcgtttgcatcacgcattacttcgtattctatttctttgaaacctgcgattgatttttcaatcagacattgtgttacgggactgtgtttcaatcctaattcagcaatttctttcagttcagtttcattggaagcgatacctcctcctgttccacccatagtgaaagccggacgaacaataacaggatacccgattctgtcggcaaaatttaatgctccttctacggtgtttacgatgtcagattccggaacgggttcgttcagttctctcatcagttcacggaaaagatctctgtcttccgctctgttgatggctgaaagttttgttcccaacacctcaactttgcattcttccaaaattcctgatttttccagttctaccgccatattcagtccggtttgtcctccaagcgttggtaaaagtgcatcgggacgttcttttctgatgatgtgacttacaaactgaagtgaaatcggctcgatgtatactttatctgcgatttcaacatccgtcataatggttgcagggtttgaattgatcaaaattactttgtagccttcttcttttaaagacaagcaagcctgcgttcctgcgtaatcaaattccgccgcctgaccgataatgatgggacctgaaccgattactaaaattgtttttatgtcgtttcttttcattttactttttaaattttattttaccaaattgctttttacgattgtatttctaatttcttgttcaaaataataagcaatatcaaaattatctgttgcctgattttccaatactgtaaccgaaattttcttctttggataatataagttaacagctgtaaatcctgctggaggagaaaatcctgtatgtccgatttcaaaaacctccgctttgtcattaattcttaatccgtagccataacctatttctttctcactgaaaagtgtatgaatatcagtaatagaataatgaatcattttctgatagctttcgtccttcagaattttaccattgtgaagaagattgttccattttgccagatctccggccgtaacaatcaaatgacttccaggataaagttctgctgaataaggaaattctttgaccagatttgtcccgtcttttgtaatcgcataactattaacaagacttttctgatttacagtattaggataaaaactacttttcattccacatcttccgaaaagctctgtaaccaattgttcatacgattttccggttgcactttccagaattttgcccagcatagcataaccaatattcgaatacttgaactgagttcccggctcaaaaagtaattcttcttttaattgccagacatcaatccctgaagaattgttcaatagatgatgaacggttaccttgtttgcccaatcatattttaaatccttcagataagtattgattggctgattaagactgattgttcccttttctacttccagcattaccaaagtcgctgtaatctgctttgcaatagacattgatgaaaacctatcgtcaaggctaagcttagtctgatttttagcatttgaaaacccgtaagctttttcgtaaatattttttccttcttttgaaatcacaaccactccattgaatgttcttggatttttggtttgaaccaaactgtcaatcttttgaaacaattgtttttgctcaacaacttttgttgtattacagcttagtaaaatacttgtagcgaaggttagaaaaagggacttcaaaataattttactttttaaagttttccattaattcaataaactcatcaaataagtagtttgcatcttcaggacccggacttgcttcagggtgatactgaacggagaaacaaggatgaattttgtgcttcagaccttcgtttgttctgtcgttcagggcgatgtgtgtttctattaagtctgtatttttcaaactttcctgatctactgcgtaaccgtgattttgagaagtgatcgctactttgtttttctctaaatccaacaccggatggtttccacctctgtgtccgaattttaatttgaaggtttttgcgccacaagccagaccaattaactgatgtcctaaacagattccgaaaatcggaacttttcctaaaattcctctgatcatttctaaagcctgctgattatcttcaggatcaccgggaccgtttgacagcattactccgtccggattcatcagtaagatttcttctgcggttacatcctgagaaacgactgtgatatcgcagtttctttgggataattctctgataattcctaatttggaaccaaaatctaccaatactacttttaagcctcttcccggatttgcataaggtgtttttgtggaaacctgctcaacctgattggttgggaagttggttgattttaattctgaaactactgtgctttcatcggcatcagcatttacgatttttcctttcaccactccgtggttacgaagaattcttgtcagtcttctggtatcgattcctgaaattccggaaaggtttttctttttaaataattcatctaaagtaatctgagtacggaaattggatggcagatcacaaagttcttttacaataagtcctttaattgccggttcaatactctcatagtcatctctattaattccatagtttccgataagcggataggtcatgcaaacaatctgaccgcagtaagacggatcagagatcagttcctgataccctgtcattccggtattgaaaaccacttctcctgccgtttccaattctgctccgaaaccttctccgtgaaacacttcaccggactccagtattaactttttcttcattttttttatttagattttctttttttattaacaggtcgcctctacgaggctttcttttttattgtccatgggttttacgcacggctattcataggtcgccctttcaggtctttggtcatttttttccatgggtttcacccacagctattgttgtttgaccctttcgggtcggcttactacttgattcttttttcttttaccttggctcttatttaaaagtatatccttgtttttccaaagcctcttttaagattgccattcttgcgaaaacaccgttctgcatttgtttgaaaactcttgagcgttcgcactctaccaaatcgtcatcaatttccactcctctgttaatgggtgcaggatgcatgatgatggcttcttttttcatggctttttccctttctttggttaagccatattttttgtgatattctgaagcggagaagctcattttggcatcatgcctttcgtgctggattcttaataacatcaaaacatctacatcatggatcatttcatcaatattcagataggttccgttgattaaggctccttcatcaaaccactgttccggtcctgagaaatatacttttgcgcctaatcttcttaacgcttcggcattggagtttgccactctgctgtgttttacgtctccaacgattcctacttttaatccttcaaattttccgaattcctgatagatcgtcattaaatccagcatacattgtgaaggatggtttcctgttccgtctcctccgttgatcaccggaatttttatatttttcagttcatcgaaataccggtctttcttatctctgattacgacaagatttacgcccagactttcgatggtttttaccgtatcataaagactctctcctttgtttacggaactgtgggaagcatcgaaaggaacgacctgcaatcctaattttctttcagcaatatcaaaacttgttttcgttcttgtactgtcttcgaagaaaagattggaacagaaaacttctccttcaattttggcagttttcccgttcgcaaaagccaatgcttctgttactatattgtttattctctcgttgcttagttctgtaatcgtaaacatattgtctttaaattttttacaaaaaaaaagcgaagaaaatatcttcgcttaaaataaataaatatcgtaaagggcgtctacgcccggtaattctaatgatataaatactgtgttattcattaggtgcaaagatataacaattctgtaaactgacaaaatgaaaattgaatttataaaaaatccatcattttttactggctgaatctgataagtaatagtgccaaagtatcattgcagcaatagatctgagcggtttgcactcttcactgattgttatgatttcttttctggatattttcggaggcagccgtttaatttttttcaaagcattcacggcggcaagatctccgataggaaaaatatcggttcgttgcagagcaagcataagataaatgtcgatcgtccagtttccgattccttttaagctgattaatgtttcccgaattttttcatcagacatttcctgaaatttctcaagattgatttttccttccagaattgaatttgccagacctttgatatatgtatttttctgtcggcttacatagcattctttcatttcagcatcatttaacttaagaacattttcaggagtgatctcagttattttttctttcagtttatgtaatgttgctaaagctgacgcgagagaaacctgttgttcgagaatgatatgaacaagggtttcaaaagtattttcccggctccacatcggaggataaccatgattttcgataattgattttaaatcctgatcacaattcgcgagaaaatcacacatctcatgaaaatttgaggtattgaaagtcagtatttcatcagtcatctcttttgcgttttgttttacaatctttatcattacatttgtttacacttttttaccacaaaagatttaaacactttagtttcttaagtttaatacttaattgaaaaaagagcacataagttaaaaaaatcaaatattttttctctttgctgacttttgaattactttaaataaagccctttgtatcttttgtagttaaatttaaaattagtacagcagaaattatttcccggtctccatgttttttaaatctgttatggattttattttgagctgatttgcctgttttcttcgcataacgagcgcatacgcattgttaaatccaatcggtttcagccaacggaccttgtattttttgatgaattcattttgtacaaactgataggtaagatcagggcttttggtcacattttcaatcgttttatgatccggagtgagcagaaccagcaatccggtacctgtatattccggataaaaatcgacagcatcattcattaaagcatcaaaacagatttttgttccgcctaatcctgttttggtttcaactttatagtttgtgtttccttcgatgagcattcggtagatttcggcaagaatatattgttctccaaaaatttttgatccgatccggacggtttgatttcctgcttcttgaggtgctttgtacagattattcctgattaaaaattcttttgctaccttttcaggaacctgatgaagataatctgtctgatagttcagttcggtcatcacggaatcattgatttttcctgaaagaagattgagcgtcttttcgagatcaggatatttctgtaaagttttttctttaacaataggagcagcgaagtaaggtggaaatatttttttatcatcatcaagaaccaaaagatcatatgcttttattcttccatcggtagaatatccgctgataaggtctagtttaccttcatacaaagctttgtacatgagagcgtcattaacaaccgaaggattgacatctagctgataaatcttttttaagccgatatctccatcttttcttcccataaattcaggggtaaaacctgcttttaatcgggttgatgagtttttattccaaaaataaattcctccggcaacaatcagcagtaaaggaataatccatatcatttttctgattgtacgatattctgatttctgaacaaaagcaatcatctgatccacaataactgccagtaaagcggccggaattgctcctgcaagaatcatattggaattgttcagggaaattccgccaaagatgaattctcccaaacctcctgctgcaacaaaagaagccaatgttgcaactccaacgttgattactgcggcagttcttattccggcaacgataaccggcattgctaaaggtaattctactttcagaagtaattggcttttcgtcattcccaaagattttgccgcttcaatgatattttcatttactcccgaaattcctgtgtacgtatttcggatgatgggtaataaagcgtaaattaacagtgcgacaatggcgggttgcggtccgatcccgaaaacgggaatcataaaacctagcaaggcaatgcttggaatcgtttgtaaaattccggcaaccgttaaaaccggagtggctaatttctttttccggctgatgagaattcccaacggcaaaccgacagcaattgccaacaacagggctataaaggttaatcccaaatgctggatcacctgaatatagatcttgtgttgctgctcaacaagaaactgccataaactttgctgcatcaggtcaactgtttttgtcgatattcattaaaagaagctgtaattgtgttgtaaagttcagcatctccggaatttgtactgatatcctgcaaaacattccaaacattctgatcttcattaaatctttttaatgaaacattttcaaattgcagatctgaaattttcgtgatttgatattctaatgttaaacggttattggcaaagaaatttttcacaaaatcattcgcaggacggtaaatcatttctttcggagttccgatctgtattatttttcctttatccatgaggcatattctgtgtcccaattcgaaagcttcggatacgtcgtgggttaccagaatgatggttttatttttaagctcatccagcgttttaaactcattatgaatctcggatttcgtcatattatccaatgctccgaaaggttcgtccatcagtaagaccggagtattggcgattaaagctctggctattccgacgcgctgctgttgtccgccgcttaattcatggggaaatctgtttaaaacatcaccggataaatgtaatttctgaataagctcctccgttctgtctttaatctgctttgagttccatttttgaagtttcggaacgacggcgatattttcggcaaccgtataatggggaaaaagacctgaattctgcatgacataaccgattcccattctcagttgctcaacgttctgatccttgatatttttaccagcaattaaaattcttcctgaatctgactcgataagccggttgatcatttttaaagtagttgtttttccgcagccgcttgttcccagcaataccagaatttccttttcatgggcagcaaaggaaatatcgtgcactgcgggacgatttttaaaacttttggaaacagattctaccgtaatcatcaatgggaattatttagccagtcggattcctgtaaactgccattgcagtgatgtgggaaagaaatttctgtatgttttccggctgtgtccttttggtgttgctaatgaagcgcctcttaacaccatttgattgaccataaattttccgttatactctcctaccgctccttcttcttttttaaatcccggataaggaagataagcacttcctgtccattcccagcgttttccccagtcaaattttccggaagcgacttcccattccgcttcggtaggtaaacgcatccctttccaagaggcaaaagcagaagcttcaaaaaagttgatgtgacaagcggcttcgtcgggagtgatttcttttagaccgttcaacgtgtacagcatccatttaccctcaataaaatgccagtataaaggagcttttgcctgattttctttcacccattcccaaccttccgcatgccaatgtctgaaattttcatatcctccgtcattcataaattccagatattctgaattggttactaatcggtttgagatttggaaatcattgagatatactttatgtctgttcagttcattatcaaaacaaaatccttctccttcaaatcctatttcataaattccttccttaaaagaaagcatttcaaaattttcaggttctgatttttctaacggaaaattttcgttgtaagcgggaaataaaggattgtgtccgagaatatatttgatatcggttaataataattcctgatgctgctgttcgtggtttaaacctaattcaaagagttcttgaagatcatcggataagtcgttgtttaaaagaaaattttccatctgttcatcgacatatttccgatactgaaaaatatctgcaaccgaaggtcggcttaaatttcctctgtcagtcctaataactcttgcgccaatggtttcataataactgttgaaaacgaaattatattgggaattaaacacctcataaccatcaagattcgggatcaaaataaaagtttcgaaaaaccatgtggtatgtcctaaatgccattttggcggacttacatctacaacaggctgaactacaaaatcttctgtttcaagcggttcgcatatttccacagaccgcgctctgattctgcggtaattctcaagcaactgtttttctttgactagtgtattctgttcgatcatcgttttagcttttaatttaaattagactttccagatcgcatctacaaaccagcctttggtgtccgaaatctgttttaatggtttaaaacctgtttttcttgccattatatcgacttctttttccgaatatttctgagaaatttccatataaatagcttcatttgccttaaagtttacctcttcctcttcaatatgtaccgactgatcttccagactgatcaggtaacttctgcaggctccggaaagcggatcgtaggtttggtaatgtttgaactgattcgttttaaaatctgcatccagctcttcattaattctgtctaaaagattaaggttgaacgatgccgttattcccgctttatcgttataggcagcaagaatggtgtgtggatttttcttcagatcaaaaccaatgagaagaatatcatccggattgagtctcgatttcaatgcattacagaactgataggcttcttcaatttccatatttccaatatttcctcctaaaaaaagaatgacttttctgcgggaagaaattttgtttgctttatcgagcatttcaaagtattctccattgagccccgtcattttaagccccagaatttcagatgtaagattttcctccaaaacagaaataatatttgccgaaatatcaatcggcatataggtaaaatctgcgttttgcgctacaagatattcaagtaagtacgaggattttgtagcatctccggctccgagttccaccaaatcaaaaggttcgtcgaatgctcgtatcgcgtttgcgagttccctcttttttccggtaaagatttcaagttcgcaatcggtgagataatattccggcatattcatgatctgctgaaaaagctcatctccttttttatcgtagaaatatttggataataaatgtttaggctcctctttcagtccgtctaaaatttcacttttaaatttatgatgggggtcgtaatcagccaatgaagttgttgccgtagtcgtatttcggttcatattaatctggatttcgtacgcagattacagcaattattttgccattgcctaaaatacaaagattaatattcgggctgtttatgaagggatttttgagttcaaaacacaaaaaatttagttttaatttttataaaattgtatatttaccattcaaaatagactatatggatttaaaagacaggatgattctcagtattattcaggaagattctacactttcggtgaaagaaatttcggaaaaaattggtcttactttcactccgacgtacgaacgcatcaagcaactggagaaacagggaattattgagaaatatgtgggtcttttaaaccgtgaaaaactgggcttaaatattgtggtttactgcaatgtgcgtcttaaagaacagtctaaaaaagttctggaaacgttcgaaaagaacattatgcagcatgatgaagttcaggaaatcatcagtctttccggtgaatacgattatatgctgaaaattattgcaaaagatattaattcttataatgattttacggtgaatgttatctcaaacatcccgaatatcggtcaatatcacagttctattgtgttgcatgaggtgaagaagtctacgaagtttaagattgatctgggttaaattgaaccattaagattttaattaagaagttaagcgaatttaagattttgaagcgaattatattaaaaaatcctatatctcttaattttgtttaactccttaaatgaatcttaatggtttaaaataaatcaacccaacaatttatttttcagcttattaaactgatattctattttatccaaacacaaattccctatacttccctgatgcgtatggtttaaattttgaatttcaaaatcgaacgcattattttcaatctcctgccctacttttatgtaagcatcccgaaatgagcttccgttttttacttcttcattgattttctctacgctgaaaagatatttatatttttcatcctccaaaatcccgtctttcacctgaatattgggtaatgtataatttaaaatttccagacattcttttaaggaatcaatcgcaggaaaaaggatttctttcgtaagctgcatatctctgtgatagcctgaaggaaggttattcgtgagtaaaataaactcattcggtaacgactgtattctgttgcagcgcgcacgaaccaactcgaaaatatcaggattcttcttgtgaggcataatgctgcttcctgtagtaaattccttcggaaagctgatgaaatcaaagttctggcttaaatacagacaaacatcataagagaattttcctaatgttccggctaaagttgccattgccatcgacagcattttttcagacttcccacgcgtcatctgagcatacacggaattgtaattcatcgattgaaagcccaaattgtatgttgtactctcacggccaatcgggaacgatgaaccataacctgccgcagaacccaatggatttttattgataatatttttaactgaaaacaacatttcaatatcatccaacaatgcttctgcataggctccaaaccacaatccgaatgaggaaggcatcgcaatctgcaaatgcgtatatccaggaagcaacacatttttatgctgttccgccagtttgattaatatctgaaagaattcgtccgttaatgctgtcaattcacggatttcgtccaataaatacaatttgatatccagtaaaacctgatcgtttctggaacgtgccgtgtgaattttctttccggtatcacctaatttttcaattaaaattgattcaatctgggaatgaatatcttcagcatttttatcgatttcaaaagttccgttttcgatcttatttaaaatttctgataagacaaataacatttgctctgattcttcgttggaaataatccctacttctgccaacattttgcagtgcgccattgaacctttgacatcgtattttgccagacgttcgtcaaaatcaagatctttcccgactgtgaatgtattgactaatatattggtggcgttatcgtctttctgccatatttttttcataaaaatttcttttttgatggaagatggaagttgggtgacggatgtttataaccaacttttatatcttcctttattaattgattttgtcattccgacgaaggaggaatctatctaaaattaaagattcttcaatccacttcgtttttttcagaatgacataactgaatatatttcttttatgttttcttttgtcttgaaatcgaagattcgacgtagtcaaacaaaagaaacaaaaattcaagactggaaactccggctaaaaattatttctgttctctaaaaattctaaacttgcgcgaattcaaaatttgttcttcggttcaatatttatctcgcgcttcgaacagtagaattttcttaacgttcacagaattaattttcttaacgcctccgattcctaagtcgttgcttacaagtctcccatcatccctcttccagcttcctacttcctacttcctacttccagcctataaaactttctccaaaatcttgatgtaaatctcaattccctcctctatttcctttatgtaaatgtattcatccgcggtgtgagaacgggtactgtctcccggtccgagctttacggaagtgcacggaatgatcgcctgatccgatgaagttggcgaaccgtacgatgtccttccaatcgctaatcccgcctgtacaaaaggatgatctatttcgatttttgaagaatttaatctgaacgatcttgcggttaatgtagatttcatctgagattgtatgatttcaaatgcttctttattggaatattcatccgtaactcttacatctaaagtgaaagtacaggattccggaacgacattatgctgaactccggcatgaattcctgacaaggtaattttaacctcacccaaatactctgaaaccttcggaaatctgaaattcagaatattctgcaaatcttccatacattttacaatcgaattatcattgttcggatgagcggcgtgagaaggagtgcctttcatttcaccgtcaattaccaaaagtcctttttcagcaatcgccagattcatctgcgtgggttctcctacaatggcgagttcaatattcggtaattgggggaaaagcgcttcaataccgtcaaaacctgaaatctcctcctctgccgtcaaagctataattaagttatattgtaaattttctttttcataaaagtgtaaaaaaacctgcgccatagaaaccaatgaggctcccgcatcattacttcccaatccgaataattttccgtctttttcaatcggaacaaacggatccaaagtatacgctttattgggttttacggtatcgtgatgggtattcagcaaaatcgacggcttgaaaacatcaaaatttttgtttaccgcccaaatgttatttttaaaacgttttgtcggaatctgatgttttttgaaaaaattttcaatttccaccgacgtgttaaattcatccttgctgaatgacggaatctcaatcagcttttttaataattcaaccgcgttatcccgcaattcttctttgctataaacagatttcagttcctgcatgatggttttctatatggtttttcagttgagtttctttaatgagaaatactttattgacattatttttcactgctcctaaagcattttccagtttgggaagaattcctttatgaagttttccgtcctcttttagggttgaaaattcgtctttggagatatttttaataaccgattccggattgttcacatcttccaaaactccttctttatcaaagcagtacagcaattccacatcatattttatcgataaagcctgagcaatgaccgaagcaattgtgtctgcattggtattaaaaagatgcccttttttatcgtgagtaatcgcagagaatacaggaaccaattccagtttcagcaattttgaaattaattttctgtttacacttttctcggtgatatctcccacaaatccgaaatctatttcggcgtgttctctttttttagctttaattaaattcgcatccgctcccgaaaaaccaatggctttacatttcttctgctgaagttttgcaacaatgtttttattgattcctcctgcataaaccattgccacaatatccaacgtatctttatcggttattcttcttccgtttacgagcttctgttcaattcccagtttatcagctaaagttgttgccagttttcctcctccatgcaccagaattttcttttcctgaatttctgcaaactgctctaaaaactgttctaacaattcctcgtcatcaattaacgctccgccaatttttatgatgtataatttttctttcattgtatatactttttggaaagccctgtcaaagtttgcaaggggaaacctaacaggttttaaaaacctgttaggtttgattgtattatgcattcaactcatctaagatttcagaaaaaaccgcctgagccgagaaaattcgattttttgcctgctgataaatgattgaattttcaccatccatcacctcatcgctcaactctacattacggcgaaccggaagacagtgcattacctttgcctgattggtatttttcagtttttcgttcgtcaacatccaattgtcttttacttcgggcattttagcataatcatcaaaagacgaccagtttttaacatagataaaatcggcatctttcaatgcttcttcctgatcatgaataatcttcacattttttgtaaagtttttatctaaatcatacccttccggattggcgatgacaaaatctacatccatttcctgcatccattctgcaaaggaatttcccaccgcatgagcaatcggtttgatgtgaggcgcccaggttaaaaccactttcggtttacggtttacactgagcttagcttgtggtgagcttgacgaaccatcgaagtgccagttttcggtaatggtgatgcaatctgccagactttgcaaaggatgacgtgttgcagattccagagaaataaccggaacttttgcatgttgctcaaactggcttaaaatgctttcgtttacatcatcttccttacttttcattcctgcaaaacagcgaactgcaataatatcgcaatactgatttaatacttcaatcgcatctttgatatgttctaccgtatctccgttcatcactgcatcatccgcaaattctaagttccaagcttcctgagctgcgtttaaggttaaaacatttaatcctaaattctgagccgcaatctgactgcttaaacgggttctcaaacttgaatttaaaaagacaagtcctattgtttttccttttcctttttcgggttctgaaagaggattttctttaatttgtaatgctttttttatgatttgctgtaagttttcaacatcgcttacagaggtgaattttttcattctaaataaattttaaagattttttaccttaaatacttaactgagtttttaacgctaggctcgcgaagtttttttatttaacttgaaaatattttcgttcgcaagggcgttctactcagctaatgataattgtgtttgtcattctgaacaaagcaaagtgtagtgaagaatctctttttgataattaatagattcttccttcgtcagattgacattccgcataattttcactatttaaatattctccaatacttctttcaaagcatttatgaatagatccgtttcttcttttttaatattaagtgccggaagaatccttaagattgctttatcattggagtttcctgtgaaaatatgatgattgtacaagaggctgttcctcacttccgagcaatctttgtcgagttcaatcccaatcatcaaccctttccttcggatgtttttgatatgtggaaaatccttaatttcattttcaatatatttgcccattttctgagcattttcgatgagattttcatctttcatgacgtctaaaaccgcaattgccgcaacacaagccaaatgatttcctccgaaagtcgtccccaataaaccgttgcttgcctgaaactttggatgaattaaaacaccaccaatcgggaaaccatttcccatcccttttgcagtggtaatgatatctgcttcaatcccaaattcctgatgggcaaagaaataaccgcttcttccgtatcccgactgaacttcatccaaaatcaagacagcattgtatttttcgcacaattctttgattttagttaaaaattcaactgttggaatcataattccgcccactccctgaattccttcaatgatgacggatgaaatttcatttccatatttttcaaaaacttcttcaagctgttcgatattgttccattcagacttaatgaatctttcatcataattcaccggagctacaattttgggattatccgttaccgaaacggctgccgaagttcttccatgaaatgaacctgaaaaatacagtaccttattttttccgttatgaaacgaagccagttttaaggcattttcatttgcttcggctcctgaattgcataaaaatagattgtaatcttctaaacctgaaagttttcccaatttttcagccagttcagtctgtaactcgttctggaccgaatttgaatagaaagatattttatctaactgattttttaattgattttgataacggggatgattgtgaccgatggaaatcaccgcatgacctccgtaaaaatcaagatatttttctcctttatcgtcccaaaggaatgatccctgcgcttttacgggattgatgtcgaataatggatatacgttgaataaattcatgtctatttataaatgataattgatttttgatgaatgatttcatctttattatatttttcttttgccttgaaatcgaagattatctcctttcagtcgatgaatactatttcgacgtagtcaaacaaaagaaacaaaagttcaagactggaaacttccgctaaaaaatattttcgttctctaaaaattctaaaacttacgcgaaatcagcatttgttcttcagttctacatttgtttcgcgcttcaaacagtagaatttcttatcgttcacaaaactatttttcttaacactacattctcctaagtcggttttaaggtcaatcctaaattttttccttttttttaattaatttcttttgtcttgaaacaaaagaaacaaaaattcaagacttggaaacttccgctaaaaatttaaattaaatcctaaaattcccaaaactcgcacgaattgaagatttattcttcgactgaaaatttgcctcgtgctcaaacagtaggaatttcttaacggattaaatttcaattttcttaacgctccattttcctaagtcggttttgattgagttgtaaaaattcacgattgacctattgactattcacgtttaaaacgctgtcgctttcaagtttaatcctaaattttcttcccagcccatcgcaatattcatgttttgaactgcctgtccggaagcgcctttcaacaaattgtcaatcgctgagtgaataaccgcaacattcccacatttttcaatctgtatcacacagcgattggtattgacaacttgttttaaatcaattgctttttcgcttacctgtacaaaaggctcatctgcataaaaatcttcaaacaactgatagatttctgaaagttctgcatctgttttcacggtggaacttgtaaaaattcctctcgcaaaatctcctctccacggaacaaaattcagactgatttcattggtattaaaagaaactaattgttgtaaaatctcatccacatgttggtgtgtcaaagttttatacgctgaaatattatcgttcctccaggtaaaatgtgtggttgcctgtaaagactgacctgcacccgtggaacctgtgattcctgttgtatacacttcattcaaccaacctttttgagctaaaggaagcagagcgagttgaattgctgttgcaaaacatcccggattggcaatgcttctggctccgaaaagttgttttttattgatttcgggcaatccgtagataaaatttctgtttccgaaatttccatcgaggcgaaaatcgttccctaaatcaatcaccaatgtttcatcttttacgggattctgaatcagccaattcatactttctttgtgaggaaggcatataaacagaatatcgacttcttcaggctgatccgttaaaaccatttcacaaaccgtcgttaaatccggatacaaatctgaaatttttgttcccgaatttgaacggctatataaaaaactcaatgatacattgggatgaagaaccaacagacgaaccagttcgcttcctgtgtaaccgttggctccgatgattcctattttctttttcattttattattttccataggttttcacctacggttattgttattgaacccttcgggttctttgtttatattgatcttttaatccataggttttacctacggctattcgtattgaacctttcgggttcattggttcttttgattttttaatccataggtttcacctacggctactcatattgaacccttcgggttcattggtcttctactatctctcaatccgacttagcggaaatccttttgtgaggtggaacgacgaataaaagattgagatccttcgacaagctcaggataaactacaggcagataaagctgcccaaattttatttattaatctgatgatatatgtttaaagaattgctaacaatcttggtgtagccttttacatcttcgcctgtccatgccctgtttgcttctccgtagcttccgaatttgtctgacatcaaatcgtgctgagattcaattccattcaaaataaatcggtaaggatgaagggttacaaatacttttccgctgactgttttttgagaatcaacaagaaaagattcgatatttctcatcacaggatctaagaaaagtgcttcgtgaagccagtttccgtaccagtcggataattgggacttcatcatctgctgatattttgaaagcgtatgtttttccaataaatgatgtgctttgataatcactgaagctgctgctgcctcgaaacctacccttcctttgattccgacaatggtatctcctacgtgaatatcacgaccgattccgtaagccgaagctaattcttcaattttctgaatggcgtaaaccggatgttcaaaattttcaccatctacggctacaatttcaccatttttaaactcaatctccagttcagagggttgattttctttaatttgagaaggaaaagcttcttcaggaagataatttcttgaagtcagcgtttcctttcccccaactgaagttccccaaagtcctttattaacagaatattgtgctttctgaaattccatttcgtagcagtgacttttcaaaaactcaatttcttcttcacgggaaagagccatatcacgaatgggcgtaataatctctacattcggacacatcacctgaaaaatgagatcaaaacgaacctgatcatttcccgctcccgtacttccgtgcgcaattgcatccgcgccgatttcaatcgcatattttgcaatttcctgcgcctgaatggtacgctccgcacttacagacagaggatagatattgtttttcagaacattaccgaaaatcagatattttacacaagaattgtaataatcttcctgagcatcaacgcacctgtatttttttaccccaagattcagggcttttttctccagttctttttcttcatttttggaaaaacctccggtgtttacagtaactgcatacacatcatatcccagtgtttcgctgaggtatttggcgcagtaagaggtatcgagacctccgctaaatgctaaaactactttcttgctcattattgtatctgttttcagacttattattttcagtgctgttttttgtattatcgggaacgaaaagcattgctgtgcaaaggcagtttttccgttcttttttcattaaaatatcataattcacgcagcttttacagccgttccagaattcttcatcctgagtaagctcagaataaataacgggtttatatcctaaatcgctgttgatcttcatgactgccaaaccggtagttaatccgaaaattttagcgtttgggtatttttttcgggataaagcgaatactttgtccttgattaaggttgccactcccaaatgcctgaattccggagaaacaataagtccggaattggcaacaaactgaccgtgagaccatgtttctatataacagaaacccacccactttcctttatcggtggcgactacagcgttaccttcagtaatttttttactgagatactcgatggaacgtttggcaatccccgttcctctgcgctgtgcagaatcgtacatttcctgctgtatttcactcacatacatcagatgcatggatgaggaaatttctacttccatttatttatctaaattttttggcaaatttaaaatataatttcttttaaaaccaaataaaaaagataattttattgaattaaattaatatacaggtaattttatctttacacgaaattaatattttgctaaattattatatatttgctaaaaagatatagttatggaaaatcgatgcccgaaatgcaacacagacaaagtggttaaaagcggaattgtaaacaacaaacaacgctttctatgcaaagactgcaactattatttcacggtaaaaaaactgggaaaacaaatagatgattactacgtaaccaaagctttacagctctatctcgagggattgagttttcgtgaaattgaaagaattattggcgtttctcatgtgacgatcagttcatggatcaagaaatacaatattacaagaccccctcattctgaatttcatccggtgtataaaatcctaaaacaaaatgaactgattgaatatatgagtaaagaagaaaatctgaaaaattcaggattaattatcacacagtttgcagataaatatatgctgataaaatgggaaagatttaagaaataattttaaaatcaattgaaaataaatgaattgagaatttaaaatcctgctcaatatcaataaatcttaaactcaaaacttagaactttaagatatatctatatacttaccattaatatatattaaatttctttaagtaaatttttaattacaatttggctttcacaaaaaacaacgccaaaaattgataatttatgaagaaattaatcacttttattggattggctttaatcagcaattctttacacgctcaaggttcaccggattatggaagcggattaaaaattaatctcaatcagcagggcgataaatatgtcaggttcattttatgggatcagttttggttgaggaacacgcaaatgaatccgggaagtatggttggcggagaacccacagacaattcatggagtctgggaaacaggagattacgtactttggcgtacgctcagatttccaaaagatatatgatcttagcgcattttgggattaacaatcagacatttatcaatggaggcggttcgggaacttcaggaacaggaggttatggaaatggtaaaaaaccgcagctcttttttcatgatgcatggaatgaatacgctgtatttctacccggagaagcaggaaaatttaccttgtctttaggagcaggattgcattactacatgggactttcccgaatgacgatggcttcaactttgaatttccttacggttgactcccctattttcacatggccattaattgataattccgatcagtttgcgagacaactgggaatgtttgccaaaggtaaatacggaaaactggaataccgtttcagtttaaacaagccttttgcaacggatttaactccggtaaatgttaccgatcctgctaaagcggttgctgtggacaacaacggaaacccgaatttttcaaaagctggatatgtagaatatcagtttttagatgaagaatccaatgtactacctttcaaagtgggctcttatctgggaacaaaaaaagtttttaatcttggcgcaggtttttaccatcaaaaagacggaacccgaacttccgttaattccactgttgaaaagcatgatattacgcttgttgctgtagatgcttttgcagatattcctttgggaaatgctaaaaataaaatggcactttccgcgtatgcaggttattacaactatcagtttggtccgaattacgtgagaaatttaggaatcatgaacatcgctgcttctgatccgaattttacgggaagcaaagcgattgcaggagtaggaaatctgcaaccaactatcggaacaggaaatatcatctacgcacaagccggattgctattgccaagtcaggctgaaaaaccaaaaatcagaatccagcctttcgcagcatatactcacaagaattttgaagcgtttgacaaatcttcgtcacagtttgatgtgggtgcaaactggttcatagacggtcatcatgcgaaaattaccacacagtattcaacaagaccggtttatacaagtccaacggaaagtccttcttcaaaaggggaattcattgtacagttccagatttatttataaaaatattaatcattattttttttacaatcgcaaaggcgcaaagcttttttaaaccagaacgtttttaagacgcaagaaaatcaaagattttcagcaagtcccttttaaattttatcgaagataaattctttgcgccttacaacataaagcatataaaattttccttgcacccttgcgataaaaaacaaaaactatcaaaatccaatcaatttaaactaacatcaaaaattaaagcatatgagcgataacaatgaaataagctacgagaatatgacggataagcaaaagaatcgtacgatctggagcgtcattacagcatcatctctcggaacactgatcgaatggtacgatttctacattttcggaagtcttgccgttgtactggctactaaattttttccggcagataatcctactgcagcatttttatctacacttgctacttttgccgcaggatttgtcgtgagacctttcggagcgctgtttttcggaagattaggagatcttatcgggagaaaatacacctttttggtcactttactgattatgggattttccacattccttatcggatgtattcccagttatgaaaccataggatttatggctcctgttttggtattaattttaagattattacagggattggctttaggaggtgaatatggaggagctgcaacctatgtcgcagaatacgcacagcccggaagaagaggttactggacttcgtggatccagactaccgcaacagccggacttttcatttcacttattgtaattatggtgacaaaaactactctttccactgaggaatttgacggttggggatggagggttccgttctggatttcaattttaatggttggcgtttcttacatcatcagaaaaaacatgaaagaatctccgctttttgccaaagctaaaagtgaaggaaagacttccaaaaatccgttaaaggaaagtttcggaaataaactaaacttcaaatttgttcttcttgcattgttcggagcggcgatgggacaaggggtaatctggtacacaggacaattttatgcgatgagcttccttcagaaagtgatgaatattgaatcgattcaggtggattatttaatggcaactgctttgtttttaggaactccgtttttcgttttctttggatggctttctgataaagttggaagaaaggcaatcatgatgaccggaatgctgatcgcgattttcgcatacagaccgatttatgacaatatgtttaaaagcgttgatttaaaatccaaaaccgttgcagaaagcggtctggttgaaaaaagaacggcaaaaattcatgacaaaattgcgacggacagtttaatcaccttccacaaagaaacgcttttcacggacggaactttggctaaaaaagacagcattgtacactggtctccgacaggacctgtgatgaaagacggaaaagctgaagaagcaaaagtaactcagtcgataaagatcaacgacagcacaaaatggtatcttgtatttttagtttttattcaggtgatttttgtaacgatggtttacggtcctattgcggcatttttagttgaaatgttcccggtaagaattcgctacacctcgatgtcattgccttatcatatcggaaacggagtttttggaggactgcttcccgcagttgccacttatctcgtaaccacaggaaaagacggaggacatcctgaatggtatctggaaggactttggtatccgataggcgttgccgctgtctgtcttttagtcggattaatttatcttaaaaataagaacaataatattcacgattaagcccagaatcacttaaaaatttattaattttaaaactactaaaatgaacggactaaaaaaaatattaggcgtactctggatcgccattgcattagttgtaggatatttcggaattacagtaatgggaattccaaaaatcacctcaggaaaacaggaagatctggttttcgggatcattatcctttgtgtactgatgccgattatttccggcggaatggcaattttcggctactatgcactgatcggggaatattctgacgataaagtttaatctattgatgatgaatgataattgattgatgatacaaaaatgtcagaccatcaattatcattcatttaattatcatatatgaaaaaaagacacgaacaaaaactgatcattctgagcatcgaacttctgatagccttcagcattcctgtttcgttgctgttcaacagtgaccgggaagttttcggttacccgatgattctggtttatattttcgctgtctggatggtttccatcattatttcttttgtaatcgtaaaaaagtatgatgagtagtttcgctttattcaccgtagttttgttttatctggcacttttattcttagtcgctcatctggcggagaagaaaaagagcaagctctggatcaacaatccttacatctacgcactttctctcgccgtgtattgtaccgcatggacgtactacggaagcattggtgtggcggcaacaagcgggcttaattatcttccgatttatgtgggaccgattatggtaattccggcatggatctacatcaacacaaggattgtaagaatttcaagggtgaataagatcagcagtttagccgattttatttctttacgatatgggaacagcagaagtttcagcgcgattattacggtggtttgtcttttggcaattgttccttacattggtttgcagatcaaggctatttctgaaacttttcatctggtaaccaaaacagcaatttctaaaaacattttaacggataacgcaactttcgttgttgttttaattgctttattttcatcctattacggaacacgttatgttgatgcttccgaaaaacgtttgggaataatttcagccattgcactggaaagttttcttaaactgttctttatcattattttaggattatttgttatttactttgcatttgacggattctcggatatttatcaaaaagcaagtcttttcaaggattttaaagaaaaaaatacgttcaacggtattgaaggtgcgatgaactggatggtgctttgcatgatttccggaacagcaatctgtattctcccaagacagtttcataccgcaatcgtagaaaaccgacaggaaaaacacatcaaaacagccatctggttttttccgctttatttattgatttttacgatcttcatttttccaattgcatgggcaggaagattgatttttgacggacaaaacgtcaatccggagttctactctattctgattcctcagtattttgacaataccttaattacggttttggtttttctgggaggactaagctcatctatttcgatgattattatttccgcgatcaccttatccatcatgctttccaataacctgatcattccttacggacttttgggtaaatttaaatctgaaaacgaagttcagaataccagaaatatcaccaacatcaggaaattcagtatttttgcactgattatcatggcttttggtttttacaaatattttattttaaaaacttcgctggattctgtcggactcatttctttcgttgtcattgctcaattggcacctgcttttttcggagctattttctggagacgagggagttataaaggtgctgttatcggtttattggcaggattggcaatctgctatttcggattaattatcccacaatactacttctcttacaatcaagaatttaaaggtgttttaagagatctatacgatgcttttgactttttcaagatttcctttttaggaagaattccacagattttcttctggtctcttttagtgaatactgctttattttccattatttcggtgagcaccaaaggaaattaccgtgaaagaaattttgctgaattgtatgtagacattgacaagtacattcaaaaccacgaaaatgcttttatctggcgcggaacagcctacgtttccgacattaaaaatattctggaacgatttttaggtaaaaacaaaaccgaacaggcattaagaatttttaatttaaaatataatattgattcgcagacggaaaccgccgattcaagatttattaagttctctgaaaatcttcttgcgggtagaatcggaacggcttctgccaaaattcttatcgaaggggtaaccaaagaagataaaatttctttaaaagaagttttaaacattcttgaagaatcaaaagaaaccatcacgcttaataaaaagcttaccgaacaatcggaagagctgcaaaagttatccgatgatctgagaaatgccaatgaaaacctcatcatcaaagaccgtcagaaagatgattttctggattctgttgcccatgaattaagaactccaattaccgccatccgttccgccggagaaattttagctgatgatgacgatattcctctggaaattaaaaaggaatttttaaataacatcatcacagaatccgacaggctaagtgagatcatcaacgatattctgtatctcgacaaattgcagcatggcgaaatcgtactgcacattcaggaaaataatattcttgaaacgtacaaaaaagcagtcaatcctcttatgcatcttattcagcagaaaaatattcatctcagtgaggttaatcttctcaatcagtttgtatttaaatatgatgaagcaagaatgattcagctttttcagaatattttaggaaatgctttgaaatttacggatgaacagggaactattcagaccaaattatcagaaacggaagatgggttaatcattaaaattttcaataccggaaagcatattcccgaagaggatctggaaatgatttttgataaattttaccagtcgaaaaatcaaaatattttgaaaccaacaggaagcggactgggactggctatttcaaaaaaaattacggaagcgcagggcggaacgataaaagcagaaaacagcggattgggcgtgacttttacaatcgctctgccaaaagaacaagaaggaggagaacccgaagggttcaatttaaatagccgtaggtgaaacctatggaaataaaaaaaacacaaatgaagaaaaatgggaacgtatcgacaaatattttatcatattgttttcggaaccaaacatcgggaaaaaacaattaatgaagaaaatgaatcagagctatacaaatatatttggggaattttaaaaaataaaaagtgtaaattatatagaattaacggaatgccggatcatatccatattttttgtgaccttcatcccactatcactctcagcaaccttgtaaaagatataaaagttgcaaccaatttgtggatgaaagaatcggggctgtttcctgaattctcaggatggcaggaaggatatggagcgtttacctattcattaaaggataaagaaacaataataaattatataaaaaatcaaaaagaacatcataagacagagagttttgatgaagaatttaaaaagcttttagcagaacatggaatcgagccggaattaaattaataaaattcaacccttacgggttgatttgatgcgaatcataatccttattccataggtttcacctacggctatttaaattgaacccttcgggttccccaaaagaaacaaaaaaacaatgcagtcgaacaaaaagataaccacaatatgaagaagataatcattgccgatgatgagcacaaaatattaatgtcgctggaatacagcttcaagaaaaacggatacgatgtatttattgcaagagacggaacagaagttctggaatttctgagaacaatgacgcccgatgtcattttactggatattatgatgccgaatctcgatggatacagtaccctggaactaataaaacaggatgaaaaactgaaagatacaaaagtaatttttctgagtgcgaaaaacaacccgaaagacattaaaaaaggtctggaaatgggagccgatgcttacgttacgaagccttattcaataaaaaaacttatgcagcagatagaagaaatgttttgatacattttacaaaccgtcattgcgaacgaagtggagcaatctcaacaaaatattaaaagattgcttcgtcactacgctcctcgcaatgacaaaaacacaaaaactaatatgaatacagatattttattcaagcaaagcatagaagacaaagagaatttctggaaagaacaggctcaggaaatcagttggtatgaattcccgaaaaccattacttctaatgacgaaaaccattacaaccaatggtttccggacggaaaactcaatatgtgctatttatgcattgataaacatattgaagatggttttggagatcaggttgcggttatttacgattctccggtaacgaaccaaaagaaaacctataccttcaatgaagccaaaaaggaaatttcaaaattggcaggaggattgatttctttaggtctgaaaaaaggtgataccgccgttatttatatgccgatgattccgcagactttgttctccatgcttgcctgcgcgagaattggagtgattcataatgtggttttcggaggttttgcgccgcatgaactggtggtgagaatcgacgactgtaaaccaaaagcattaattacggcaaccgcaggagttgaaattgcaaaaagaattccttatctgcctttggttgaaaaagcgatcgaactggcacaggataaggtggatcatattattgtttacaacagaaaattagttgacaatcaacatgaaatgtttgatgggttaattgattacgaagaattggttcagaattcagaacctgcggactgtgtttcggtggaatccactcacccactctatttgctgtatacttccggaacaacaggaaagccaaaaggtgttgcaagagatacaggaggttacgcaactgcgttgaagttttcgatgaaatatatttatggaatcgaaccgggagaaactttttgggcagcttccgatttcggatgggcagttggtcacagttataccgtttacggtcctttaatcaacagaaattcaacgattatttttgaaggaaaacctattatgacgcccgatgcgggaacattctggagaattatttccgaatataaagtagcagccatgtttaccgctcctactgcaatcagagccatcaaaaaagaagatccgaacggagaattggtgaaaaaatatgatttaagccacttcagaaagcagtttttagcaggagaaagatgtgatgttgccactctggactggtttgcagaacacatcggcgttccggcaatcgatcattggtggcagaccgaatccggttcacccatgttgggtttaatgacttttaatgaagactacaaaataaaaagagcttccgcaggaaaaccaattcccggctatgatattaaaattttcgatgaaaacggctatgaactggatgcgcatcatgaaggttatttagttataaaattaccgcttcctcccggagctttactgggaatctggaaagattatgcccgttttgagaaaagctatctctcacagtacaaaggctattatttttccggagacggagccataaaagatgaggacggctatattttcatcacaggaagagtggatgatgtaattaatgttgcaggacaccgtctttccacttcagaaatggaagaaattgtttcctctcatcccgatgttgcagaatgcgctgttgtaggaattgatgatgagctgaaagggcagattccttttgcaacggttgttttaaaaaacggatcatctgtttctgaggaaaatgtagaaaaagacatcgtaaaaacagtccgcgaaaaaataggcgccgttgcctgtcttaaaaatgtgatggttgtaaaacgcttacctaaaacccgttcaggaaaaattttaagaaagctgatccgaactctactggatggaaaagaattccagattccttcaacgattgatgacgaaaagattattgaagagattcaggaaaaaattggagattacagagataaaatataaaattgtttaaactatttcaggtttaaccacaaaaatcgcaaaagacagtattaaagtgaatttctataataattaaagcgctcaaaaggataaaaatcaaagatttttaaaaactattgttatctttttgatttataataatcaactttaaataaaggtttagttcatcttttgtgacttttgcggttaaataaaaatttaaacagactttaaaaagagactaaaaatttaaataataaaatttcaaaaaagaaggatatgagaaactatcagatagaaaacttaccgcaatattttgaagagtataaaaaatcgatcaaaaatcctaaaaaattctgggataaaattgcagatgaaaatttcgtgtggtatcagagatggagcaaggttgtgaaatacgatatgaatgaagccaaaatttcgtggtttaaaaatgctaaattaaatattaccaaaaactgcatcgacagacatttagccgtaagaggcgataaaacggcaatcatctgggaaccgaacgatccaaaagaagaagcacagcatatttcttacaacgaactctataaaagagtgaacaaaaccgcgaatgttcttcgtgaaatgggcatcgaaaagggcgacagagtctgcatttatcttcccatgatccctgaattagccatcacaatgctggcttgtgcaaaactgggagccgttcattccgttattttcgcaggattttcggcatcggcagtttcttcaagagtaaatgactgtggtgcaaaaatagtcatcacctcagacggaagctacagaggaaacaaagttttagatcttaaaagcattatagatgaagctctggaaaaaacaccgagcgtagaaaaagttttggtggtaaaaagaaccaacaatgaagtaaaaatgaaggagcacagagatttctggatggaagatctttacgaaaacgcctctccggatttcgttaccgtaattatggatgcagaagatccgctgttcattctgtacacttccggttctacgggaaaacctaaaggaatgcttcacacctgtgccggatatatggtgtacaccgcgtatacttttaaaaatgtattcaattataaagaaaatgacatttattggtgtactgcagatattggctggattacaggacattcctacatcctttacggaccacttttaaacggtgcaaccactgttattttcgaaggcgttcctacttatcctgaaccggacagattctgggaagtgattgaaaaacataaaattacacagttttacacggctccgactgcgattcgttctctggctaaagaaagttcagaatgggtagacaaacacgatttaagctcgttaaaagtgatcggttctgttggagagcccattaatgatgaagcttggcattggttcaacgatcatgtaggcaacaagaaatgtccgattgttgatacttggtggcagacagaaaccggaggaattatgatctcgccgctccctttcgttacgcctacaaaaccaacgtacgctactcttcctttaccgggaattcagcctgttctgatggatgataaacgcaacgaaattaccggaaatcaggtgacgggaaatctctgcatccgttttccatggccgggaattgcaagaacgatttggggagatcatcaaagatacaaggaaacgtattttactgcttttccggggaaatatttcacgggagacggtgctttgagagatgaagtcggttattacagaattactggtcgtgtagacgatgtaattattgtttccggacacaatttaggaacagccccaattgaagacagcatcaatgaacatcctgctgtagcggaatctgcaatagtaggttatcctcacgacatcaaaggaaatgcgctgtacggtttcgtgatcctgaaagaatccggagaaagcagagataaggacaatctgaaaaaagaaattaatcagttgatttcagaccagatcggtccgattgcgaagctagataaaatacagtttgtttctggtcttccgaaaacacgttccggaaaaattatgcgtagaatcctgagaaaaattgcagaaggagatttcagcaacttcggagacatcactacccttttgaatcctgaaattgttgaagaaattaaaaacgaaagaatttaatatttttcactgaaacctatatataacctcgcagaaatgtgaggtttttttgttatttttaacctgagttcgggataagtcttcttaaacgcaaggttaaacaaagaaattcaattatcaggaattcagcttttaagatatacaaaggcgtaaaattgatcaaagtaataccattttcgtcttttttaaataaacgaagtgcctttgtttagcttacaaactttcaataagtaaaaaaaatcttttgtttttctttgcgataaaacaatacaacactataaatcaattatttaaaattatttcttatcccgaactgaggttatttttaaattcaattaattatcatgaaaaagcttattcttctgacattttcaactgtttttctgaacgctcaaaattataaaatatcagatttttctaaagattactacgcaacagttactaaaaactcaagagacaaaacatcacagatcctcaaagtttttagtttaaaaaacaaaaaaccgcttatcacgcaaacggtaaatttaagcgagtatgattttaaaaatacccaatccaatattgcagaaatcccatatggtcattatagtattattatctatgatgattttaattttgacggtaaaaaagatatcgcaataaaatatggtaatgaaagctgctacggcggtccgtcgttcgtggtctatctttatgaaaataacacatttgttgaaaatgcagatttttcagatttagcccaaaactattgtggcttttttgatgtcgataaagccaaaaagcagattcatgtcatgactaagtctggctgctgttggcatcaatattctgatttcattataaaaaatggctcaccttttcttctgaaacaatctgaagaacagctcgatgcttccggtctttattttgaaacagaagttaaagaatggaaaaacagatacatcaattataaatacaaaaccattgatactgatattgttagtaaatacattcttctctcctacacgctggaaaataacaaaaaaatgtaccttattaaaacagaaagtaaccaactgtattattttttcaccaaaaaaaacggagatattgaacttctttaccgtaatatctttttctattcaaaaaaagaaaattcgctttcttttgaaagtggcaatgtgcgttatacaatttttaataataagatcgaagttaacgtgaataatgcaaaaaccatcatccatgcaaaaaccatcatccatgcaaaaaccgaaacaagaaaaaataacatctcagatatatatcatgcttttaaaaatgaaaatattgaaaatctggaaattatcaattagtaaaaatcaaacatttgttcaatagaagatttcaaagaaaaggcaaaactttatagattttatattaatacaaccatttaattgttattttcttaaaatacatgaattattttcactaaatttatattcaacttaaaaactattgcttatgtcaaatatattagctggattatttggacatcacagcgattataaaaaaatagaagcaaaccttgaaaactcaggtttcacagattcagaatatattgtctatcttcatgatgatgagctacattcccagtatctgataagtgtagccgtaaaagactaccatcagacagataatgcttcctctattttcagccggaataatgtgctaaaaacctatctttttgaaaacatagaaattgagcaggcaaattatatgaacatcaaaaagtttatcgatgccagaaataaagcggaaatccacgacagtccggatataagaataaaaacctctactgccggaatggattctgaagtaaaattttaaccattcaagataaaaattaataaccgaaatccgcagagcgttctgcggatcttttaatgctgaaaactgcaaaaaatttcgtattttcgtgtaaatataggcttttacacaaatgagttacgacttagaacaggaaaacaaggagatccttgcaaggtataaggatctgatttcgaatacatacagaactttagatgaggaaaataacaagctcatccgtaaggcattcgatatagcgctcgatgcgcacaaagatcagcgaagaaaatctggtgaaccctacatttaccatcctattgctgttgccaaaattgtagcaacggaaatcggtttgggagccacttccattgcgtgtgccttgctgcatgatgtgatcgaagattctgactacacttatgaagacctgaagaaaatttttggtgaaaaaatagccaatatcgtgaacggactcacgaaaatctccatcatgaatcatcagaatatttctgtgcagtctgaaaactacagaaaacttctgttgacactgtctgaagatttcagggtgattcttattaagattgcagaccgtcttcacaatatgcgtactctggaaagcatggctccggacaagcagaagaaaattgcttccgaaaccgtttatatttacgctccgatggcgcatcgtctcggattatacaacatcaaatctgagcttgaagacctttctttaaagtataacaatccggatgtttacaaagaaatcaccgagaaattagaacttgccaaagaaagccgcgaaagatatattgaggaatttaaaaaagaagtttctgagaaattaaatgaagaaggattaaatttcaaaattaaaggacgcgcgaaagccatttcctcaatttacaggaaaatgctgaaacagggcgtttcctttgaagaggttttcgacaattacgccatcaggatcatttataaatcggatgccaaaaacgaaaaattcctggcttggaaaatttactccattgtaacggatgtttatcacagcaatccatccagaatgcgggactggatcactcagccgcgttctacaggatacgaaagtttgcatttaacggttcttggtcctgataaaaaatggattgaagtacagatccgttccgaaagaatggacgaaattgctgaaaaaggcgttgcagcgcattacaaatacaaagaaggctacaaacaaagctccgaagaccggaattttgaaaactgggtaacagagatccgcgaagttcttgaacagcagcaggatctttccacttcggaattactcgataatattaaactgaatttgtattcgaaagaagtctttgtgtttacgccaaaaggtgagattaaaattttaccgaccaatgcaaccgctctggattttgccttttccgttcactccgatctgggaatgaaatgtttaggtgcgaaaatcaatggcaaactggttccgatttcgtatgttttgcaaaatggggatcagatcgatattttatcctcccaaaatcagaaaccaaaatccgactggcttgaatttgtcgttacttcaaaagctaaatccaagatcaagagttatttaaactcacaaaaaaatcaactggttgaagacggaaaagaaattttacagcgaaaactgcgtcatgcgaaaattaattttaatgatgaggaaattaataagcttcaaaaattctttaatcttaaaagttcacaggaattatttttaaaattccaaagcaacgagctggatgcaagcagtttaagaaaatacattgaaagtaaaaacgtatttaacaatctgctttcaagattcagaaaatcgcctgcgaaaaatacaacttatgtagagccgaaagagcagaatctcgacatgatcgtctttggaaaagatgaagaaaaactgaattacagctatgcaaaatgctgtacggtaattccgggagacaaaattttcggattcatcacgatttcagacggaatcaaagtacacagcgataattgtccgaacgcgatcaaccttcgcgcacaatatgattacagggtaattcctgcgaaatgggtgaatgcggaaagcttcaaaaacagagtaaaaatagaaattgaaggactcgacagaatgggaatgataaatgatattaccaccgtcatcagtggtgcaatgggaatggatatgaaaagtatgtccatcgaatccaacgacgggatttttacaggaacgatcattcttgaggtaaaaaataaaagtcagctcgagcagaccttcaccaaactgaatgatattaacggcgtctccagagtgagacgactacaatcttagatatgaatttaacggtatattttaaaaaatttttcgaaagcagtcaggcttcaggaattatcctgattttctgtgttttagtttctttacttattgcgaattcttcttttgccgaaagctttcagcaatttttgaacagagaaacaggaactgaaatcttacatttaaaatatcctgtcagtatctggatcaacgatggtttaatggcaattttcttccttttggtaggattggaaattaaaagggaaatggtggaaggtgaactttcttcatttaaaaatgcttctctgcctatatttgcggcaatcggcggaatgcttgttccggcaattatttatagtttttttaatttcggaacttcatacggaaacggttggggaattccgatggcaacagatattgctttttcactggcgattatttccatgctgggaaaaagaattccgaattccattaaaattttccttgctgctctggcaattgtggacgatctgggagctattctcgtcatcgcaatattttatacagaacagatccattggatgtatttatttttatctttaggaattacagtgcttttatttttactgaatttcctaaaagttacccgaattatcttctatcttgttccgggattatttttgtggtatttccttcatcattcgggaattcatgctactattgcgggggttttactggcatttaccattcctaccaatgtttcaaccgttgagatttctcctttggaaaaactcgaacatcagcttcattttccggtaagttttctcattatgcctgtttttgctttaaccaataccaacatcactttcaataacgaaatgatcggaggtcttacaagcactttaggtttgggaattattatcggattagttgccggaaagttaatcgggatcaatcttttttctttaatagccataaaacttaagctaagttctctccctcaaaacagcacatggatgcacatgattggcgtaggattgcttgccggaattggttttacgatgtctattttcatcgcactgttgtccttcaaggatgaaattccgattcaggatgaggctaaatttgccattttaattgcttcttttatagcagcggtttccggttttttaattttgaaagtaagctctaaaaatgatattattgaagacgaggaaaattaattttcttcgttttttttatcgttaaatttccacttatgattttcatcgccttctaaatccggctcagaattttttgcgtgatagtcttttgcttctttcttcagttcatcggaaagcagtttttcaattcttacttttcttaaagccatgttcagttcgttgccaaaaagcagaagatatacatttacatttacccagaccatcagaagaatcatacttccgatagagccgtaaagaacgttgtaacgggcgatattcttcacataaagcgcgaatccgtacgtggttaccacaaacagaaccgtggttaaaatagctcccggaaccgcctgtctgaatcttgcgattcttaccgttcccaaccagtaaaatagagtaagcagaataaaataaaagatgggaaacgatacaaatcctatgatttttgaaaggttatccaccagccacgaaatatcctgaaccggcgtaaaaagtttaagaacaaactctgaataatagactccgaaaagcgctaaaaacacaatcgtaataaacccgatggtgatgaaaaaagacagaataaattctttaacatcagacattttttcatcggtattttcattaaatccattaatgagtgaaaacgttccgtttgttgcaaaaatcaaagcaaaaacaatggttaaattactgattcccttcatattgggaacaatactcgtttctatataatttcgtacgtcaccttctatattggacgggaaaacattatgcagcaacacttcaaaaatgtagaactgaagcttgtcataatgcggcatatacggcaaaaccgaaagcaggaacagaataaacggaaaaagactgatggtgaaactccaggaaatagccgcagcttttcttccgattttatctttaaaaataccgctgatatagatctgaaacatctgccaaagcgatattcccaaaaaaggaatatgtatatcgtcaaaaaattcttgaattttcaagatgaatttaggaagttttatgcccatacttattttgcttcatcataaaggtgccatacaaaaataatgatttttttaaacttgaaaatctgatgccaattttcagatgatgagattatttaatttatgaatatctttgctgtctaaatttaaattaaaaaatgcagattaatttgctttgcatcggcaaaactgacgataaggaaatctcttctttaatcaattattatctgaaacgtcttcccaaacactggaattttgaaattattgaaattcctgacgtaaaaaatgcaaaaaatctttctcctgaccttcttaaaaaagaggaagctaaactttttatgaaccacatcgacagaacagattcagtaattattcttgacgaaaaagggaaacagtttaccagcagagaattttcccaaaaaattgacaactggatgaattcttccgtgaaaaaaattcatattctgattggcggagcttacggtttttcagaagaaatctacagcagagcgaatgaaaaaatgtcgttatccaaaatgacttttacgcaccagatgatccgactgttcattgtggagcaattatatcgagcagaccagattttgcagggaaaaccttatcataatgattaaataggataaggttttaaaaataacattaaacttttaagccaatctgtctttttgcttcgcccaccacaaaagcaacggaattggcaatattaaaacttcgaatcaatttagacatcggaatcgtcagatgattttcaaaacgatcaagcacatctttacttaaacccacactttcttttccgaaaaccagccagtctccatcctgaaattctgtttccagataggatttttcggcatgggaactcatcaggaaaacacgcgacaaatccggaatattacggatccattcgtcgacattctgatattccgtaacatcaagatgaacccagtaatctaatcctgaacgtttcagatttttatcattaatgacaaatccaaaaggatgaattaagtgtaatttactttctgttcctacacacaatcttcctatatttcctgtgttattgggtatttccggttctacgagaacgatgtttaacattgaatgacttaaattattttgaagtttgaaaaggatataaacttaactctttgtagtgatcatcacaatttgtgtaattcctttttctttaaattttttcctgatcttatcgtctttaagaaccattacatattttatatcttcagccggaattttttttacagtctcaatatctgtttcttttttattgatgtaaaagagagaattttcagactttgcatcagcttttttcaaagaagcttccaaaagtgaattttccctcgtctttacttcagtttgctgagcatttgcaacagtcattactccaaaagtaaaaactgccgttatcaataatttgaaatttggtattttcatatagtatcgtaatttattttttaacctcacatttagcatactgatccatcagcaaaggcttttcatatcccatacttactgctttatccagacttgcacatgcttctttcggttttccggtttcaaataaaatcaaagctttatttacatgagcctgagcaaatttcggatcgatagaaattgccttattaacgtctgcaagcgcttctttgttttttttcagcctaaaataaacgtctcctcttccactgtacagcaaagattcgggtttctcagaaataagctggttgtagtcttttaaagcaccttcaagatctccgctgttttttttcagattcgcgagtccggttcttgcataaatattatcgggagcaaacgtaagaatcttgttaagatctttcatggcaagatcttttttgcctaaactttcatagactttagaacgggtaaggtaaatatctgcattttcaggctcaatctgaagccctttgttgagatagtctattgctgcctgtttatttcctttctgtccgtgaatggagcctaaattggcgtatacagcagcggacataggatttgcttttaaggcagattcgtaagatttaaaagccagtgcagttttacccagccttctctgggcagttcctaaattgttgtaatattccgactgtaatttctggattctttcactttgagccaatttggaatattgttcttccgcacatttatagtccgctttctgaaagcagtcttcagctatttttttgtcctgtgcgttaagattgaatgaagcaaatactgctgctaaaaggaataaagattttttcatgaagttattttttgtttgttgattactttttttgcgagcgcactgaaaactactcccaataaagatccaacaaacgcccccaccaaaatatctatcgggaaatgcactcctaaataaatgcggctgtacgcaaccactgccgcccatacaaatataacataaggaaaccatttaagattcttttttaataaaatacttaaataagttgccagaaaaaatgtattggaagcatgagcagaataaaaaccgtactgtccgccacatttcacaattctcatgtgatgctccaatgtaggatcgtgacacggtctgagtcttgcgaccccatatttgaaaataccggcaagctgatctgaaaccgtcacgcctataccgacaaagattaatataaaaactaaagatcttagtttataattcttaaataaaaaataacagaaaataatgtaaagcggaatccagatccatgtactggaaatgagctgccaaaactgatcaaaagattggtctcccaagttattgagaaacaaaaagacttttttatcttcctgaatgatctcctccatcctatctgcttacaggaccttcgtaggtttcgtcttcagaaggcttcggttttggaggttcattggatgcctgagctgtctgaggttctgttaagatatctttctgaatatcattcatcggattgaaatcttttgcagcatcttttactttctcaatttcacgcttaatctcagaaacaggattgtctgtttctttcatgatctcggtcttgatgtcttccactgcgccacgcatttttcttacacccgaacccaagtcgcgtgcaatctgaggaagtttatccggtccgaataatactacgattgctatggcaatcagtgccatttctccaatgcttaattccatattgtaaaattacgaaagatatacgaaattggatgttaaatattaacttttaataaaatattaagctgtattaaaaacatttcagattttcaaaatttcataaaaaattgattaataaataattaccacataaaaacataactttctaatattgtaactatttactaattatttctttaaatgcggtctacacttcttcttttttgatattttttttcctgaaattaatataggtaataactacgctgatcgtcattaaaatgaaagctaagaaaaaaggcgcacccgaaaatttaaaaggagcttcgtcgtgggtgaaaaagtaaaataagttcgtcatcatcggaggaccgataattgaagtggcactcatcagacttgttaatgcaccctgcaattctccttgctcattagccggaacacttttagtaattacagattgcaaagccggtccgcagattccgcctaaacagtaagggactaaaaatgcaaacatcatccagccctgcgttgcaaatgcaaagagaagcatcccgaatgcatacaaagcaagaccgtaataaatgcttttctcctctcccaatttgggcgttgtccatcggatcaagcctccctgaaccaatcctacgagcaaaccgaccactcctaaagaaattcctaccattctttcgttccagttgaatttatacatggtgaagaagctccagttgctttgtacagcatgtcctgcaatataaattaagatcaaagaaactattaaacctgagatttcgggatgttttcctaaaaatttaaaagacccgacaggatttgctcttttccagttgaattctcttcttttatctttatctaaactttcgggaaggataaaatatccgtaaaggaaattcagcagacataatcctgcagccgcataaaaaggaactctagaaccatattctcccaaaagacctcctaaaacgggacctatgatgaatcccagtccaaaagcagctccaatgagtccgaagttttttgcacggtcttcatctgtagaaatatccgcaatataagcactcgccgtagttacacttgcgcctgtaattccggcaataacgcggcctaaaaacagccagacaatggaaggagccaaagcaaggaaaatataatctattgaaaaaccgaaaagcgagatgagaataataggtctccgtccgaatttatcactgagattaccgacaatcggagagaaaataaactgtgtaaatgcataggcaaaaccaagccagcctccatattttgccgcctcacttatgttactatgaataagttcttcaataagtttgggaaccaccggaatgatgatgccccatcccgtaatatctatcagtaaggttataaaaatgaaaccgattgcggctttttttctcgaattttccatacgtatacaaaattataaaaatattgatttcaaatggtattaattatttgttgattgatatttgttattgtaactgaagatttcatgtttttgtgtgaaaggaattttcccgactgcaaccctagtcctgattgcagcatttgtttgagctcattttttagttttggatttcgggcgcggcttcgccgcgcccgaaatccaaaactaaaaaatagcgagtgcggaaagcaggaaataactcctgattaaataaagaatttaaaaacaataaaaattttaaggagaagttttcaaaatccacaaaaaaagcctcccgaaaccggaaggcttttattcttatttattgtagtataagttattttgaagcaagtacttctttattggttgttgatttaccatgtacttcatcttcttttcctgttttcaggaagtcgtaggcaattgcggatgccacgaagatggatgaatatgtaccgaaaccaataccgattaacatcgcaaacataaatcctctaaggttatctccaccaaaaatgaagattgccagaattacaagaattgttgtaaatgaggtgttgaaggttctacccaaagtacttgaaatagaatcatcaaacaatcctgccaatgttaacgatttcttctctcttaaatattctctgattctgtcgaagataattacggtatcgttaattgagtaccccaatacagtaaggatcgcagcgatgaaatcctgattgatctccatattgaacggcatatatttgtgaagcaatgaatacgctcccaaaataatgatcgcatcgtggaataacgcagcaaccgcacccaaagagaactgccattttctgaatcttaataagatgtagataaagataattcctaaagctcctaaaacggcgtagatcccgtgaattttgatatcatctgcaaccgaaggtccaactttttcagaagaaataattcctgcatgttctttatctgctgatttgaaatctttcaatgttgttcctgcaggtaagtttgattttaaaccttcaaataatttttgctcaattatctgatctgctttcagagattcgtcttcgataaggtaatctgtagagatctttacctggttgttgcttccgaaagttttagcttcaacagaagagttctttccatcttccgttttgaataaagcgactaatttatcttcaacatcttccgcttttacatctttatcaaatcttaccacgtagtttctaccacctgtaaagtcgataccgtatttgaaaccgtgtgttgcgattgaaataatacagataaccgttaaaacagccgagaaaatgtatgcatattttcttttcccaataaaatcgatccaagtatttctgaaaagattcttcgttgccggagtccatacagaaagtccttttcctttagacaatcttgagaagatcattactcttgaaagcaatacggaagtaaataaggtcattgcaaccccgatcatcaacgtcaatgcgaaacctttgataggtcctgttccgaagaagaacaatacaaccgccgttaagaatgtggttgtgtgaccatcgataatcgcattcaatgcatgtttgaaaccatctttatatgcttcaagaatactttttcctgcgaataattcttcttttgttctttcgtaaatgataacgtttgtatcaaccgctactgccatcgttaaaacgatacccgcgatacccggaagcgtaagcgtaaagtcgcccgaatccataatcccgaaaatatagaataagttgatgatcatggcaattactgcataaacacccgctccaccgtagtagaaaatgatgtaaacgataatgatcgcaaaggcaatcatgaacgacattaaccctgcatcaatcgattcctgacctaaagacggccctacaaccgtagcctgaactacttttgctcctgccggtaatttacccgctcctaaaacgtcaaccagttcttttgcttcctcctgagagaagttcccagaaatctgagttctaccgtttggaatagcacctacaacgttcggcgcagtgtaaactctgccatcaagcgttacagcaacaggttttccaacgtttttctctgttaatgttttccattctttagcccctttagaatccatctgcatatctaccactactctgctcaactcatcatagctgatgtttgcactttctacagcaccgtctaccggagctttctggttgatatttcctctgatggcatataataccaagctttctgcatcggaagcttccggcttgtatccccacataaactgggtatattttatgtttgcaggacgtaaagactttgcaactttgctgtttaaaattttgtttacaacagcggtatcagacaattttacgcttcctacagcactttggctcatagattttccaccctgcatgatattcatgaagtttacattttttgcaactcccatcgaatctccttttgcagcgatcatggtagctaatgtctggaaataaggataaacctcaggagattgctgtacttcccagaactgaagttttgcagaagtctgaagcattttctttactttatcgatatccttcatccccggcatttcaacagaaatccttgcggttcccggaactctctgaacgttcggctggattgctccaagcttatcaattctggttctgattacctcaaaagcggttcctacagatgcatcgatctttcttttaacaattgcttttacctgatcatcaggcgtgttgtactttacttctgtaagcgttgtatttccgaaaagttccggatctgccaacttcaggtttgtaccttttgctttgttaattgcatcgaactgatcgaagaaattgtcgatgtaagcttttgtagaattcttctgaacttcatctgtcttgtttaaagcctcaataaggatcggatttgtagaataccctgtaagatcattcacaagatctctctggttgatttccaaaagaacgttgatcccccctttaaggtcaagaccaagcttcatttccttgtctttggcttttgtgtaataaagtttagtgaatcccagattcagagtatccttagaaagttttgcaatttctttctgatacttctccggattgtctcctgcaatagcagtcgcctgcttttcaattttgctggcgtaccatgttggtaatagctcatttaagcaaattaaccctagtacaatagcaacaattgtaataagtccttttccttgcattttgttataactacgttaaattaagtcggcaaatataatcattttcttgaattttatgaatttttaacaacagaaatcgtttattttcagatatatcggcattcttattttcatttaagatttaataattttttcgtgatattttaatgaatttttcaatgtttcattggtacgaaattttcattcagatttaatacactaaatatcaaaatattatgaaaaaactacttttttgcgcaggtattttttcttccctcctctttaatgcccaaagcattattctggaagaatttgcgaccgggtttacggcacccgtagaaatcaccaacgccaacgacagccggatgtttgttgttcagcaaaacggaatcattaaaattttacaatcgaatggaacagtaaactctactaactttttaaacatcagctcaaaaatcacttacggaggagaaagagggcttctcggactggcttttcacccgcaatacccgacaaacgggtatttttttgtgtattacaatgacaccggcggaaatattactgtagccagatacaccagaagttctgccaatcctgatgttgccgatcctgcaactgaaaaaattgttctgaatctcccaaaaccttttgataaccataacggaggaagtattcattttgcaccggatggttatttgtgggtggttaccggtgatggcggaagcggcggcgatccgaacaataatgcccagaataagaattctcttttgggtaaattactgaggttggacatcaattctaccggagcgtacaacattccgcccggaaatccttttgtgggagttgacggagccgatgaagtctgggcttacggattaagaaatgcatggaaatttaattttgataccgtttcaggtaatgtaatgattgccgatgtgggacagggacagattgaagaaatcaacagaatgccgttaacacaagccggaattaactacggatggcgctgttatgaaggaaataatacttacaatacggcaggttgcgccgcgcaatcgacgatgacttttccagttgcagcctatgatcattccggaggaaaatgttcgataacgggaggttatgtttacagaggaacgcagtttcctgcgttacagggaagatatttttttgcagattactgctccacgcagatcggaagtctgaattccgatgattcgatcacatggacttctgctttttcaggcaataatttttcaacattcggagtgaataatcaaaatgagctttttgtagctgccgtcaacagcggtaaaattttcagaattaccacgacaagtctgggaacgaatgagagcagtatttcaacccagataaaagtttatccgaatcctgcttcaaaaaaggttttcatcgagggtgtaaaagataaaaacgcaatagttgagatcatcagttttgaaggaagaaaggttttggaactgggaaaaattgaaaatgacaacagtgtaaatatttcaggaattcctgcgggagtttatttcatcaacttaaattcaggaaatgaaaaatcttacagcaaaaaaataataattaaataaattttcaaacagtttttaataggcttcagtcggttttctgattgaagctttttttaaaaaataaagaattgaaagaatcggaaggattaaaatgagcctaatccataaagaaaacctctccgtttcatcatcaaataaaaaattcggaatcagggttaccaaaagaaaagcagccataaaaaatacaatttcgggaactgatattgactttgtctcatgttcattcttttcagattttgagcttaaaatccagaaaattaaaaacagaatcataaaagggaaactccagattctgtaggtatcataagcgatggcatgcaacagcaacggaataaaagaaactgatgccaaaagtatgaagagctgaatattcttctgtaatttaaattccttaaacatcatccataaagaaaaaagaagcggaattccgtaaaatatcgttgctttggatataaacagtctttgaataaaatgcacatactgatctttaagataatacgaaaagctttttgtataggctccggaaacagaatctgcaacttttggtgaaattgatgagcctttcagatagctgaaaatttcagaataataatttcctccataaatttcctgaaaaaaagaaattgaaaacacagcaaaaagaggcagaataataaatacaccaaatttctttaaaagatgtttcgaaaaaatgtttctgaaggaaaatcgctgtattgaagtttcattcataataatggaaaaacaacagacaggaagcatcagaaaaagagaaatctcgtgaataaaaatactgaaaacggcaaccaacgaagataaaaataactttccccgcccgatcaggtagactgataaaatggtcaataggaaaataacatgatcgaaatagccgattaaatgagcagaaaaaacgatgtattgggaaagcagaaaaatgacaaagaataaaatcctgtaaaaacttttctgaaaatttaaggtggtttttaatgcaatttttaaaatgaaaaagtacagtaacaataagatccctgctgaaagaacggtaatcgaaaacagcttcttctcacataaaaaaccgaataattctccggcaaaacctcttttgataaatccaaatctgtaatccagcaaccaatgagatcttgcccattcattcggaatccttatcgtttttgaaacgctgaaaaccagcgcatacagataaagaaatatcaaaagaaattttctgttcatgccattatatcgtcatcgagaaaattctcgtttccggcttatttctcatcattctgagatcgaaaaccatcgctacatttctcgtaaaggctcttcctttttctgtaatctggatatgatgaccgttaatttccaccagttcatcattttccatttctttcagcatctcaaatgcattttcaagctccggaaaagaattattgatgtcaaaagtggtttccaactgacacatcaggttcagaatatgtcttcttaccgtaagatcttcatcattcagaatatgaccttttacgacaggaatttctccttcttccaccattttctggtattcttccacggttttgatattctgggcaaaagcataccaagaatctgaaatggcagacattcccaaaccaaccatcaactgggttttgcttgaggtatagcccatgaaatttctgtgtaatttcttctgaatcagagactggtacaaatcgtcatgttccagagaaaaatgatccattccgacttcgatatagcccaattcttctaataattttttaccgtcttcgtacaaacggcgtttttcttcaccacttggcaaatcgttttcatcaaaacctctttgtccgacacctttcacccacggaacgtgcgcgtaagaataaaatgccaatcgatccggttttagttccatcgttttgcggatggtgctttccattgcttcccaagtctgatgcggaagtccaaaaaccaaatcgtgactgattcctctgtaaccgatttctttcgcccattccgttacttctctcactttttcgaaagactggattctgttgatcgctttctgcactttcggatcgtaatcctgaacgccaaagcttactcttctgaagcctaaatcgtacaaagtctgaagatgctctttcgtagtattattcggatgtccttcaaaagaaaattcctgatgttcggcaatttctacggtttcaaaaattccttccagtaaggtttttaagtttttcggagaaaagaaagtcggagttccgcctcccaaatgcaactctttcagtttgggcttttcgttaaacagtttaaggtaaagctgccactctttcaaaacactttcgagataagggatttcaacgctgtgttgttttgtgatccttttatgacatgcgcagaacgtacataaagcttcgcaaaaaggaaggtgaatgtatatagaaatcccctcttctgcattactttctttgaatgttcggatcacactctgcttccacaattccggagtgaaagaattttcgtcccaataaggaacggtaggataagaagtgtaacgaggtccgggaatattatatttatcgattaaagaattcattttctgtttacaattttaaggtgaaccaatatcaggtttcacaatgcaaaattaactatatctgatgaattttgtatcatgaaatatattagtcgtttttcaatcaaaaattctctacaaagatagggcaaaaaaattccacagtatgaaatgctctgtcttaaaaaatttaaataaagttttcaattcttctttaaagataaattttataatcacagaataaaagttgctattataatttttcattattttgcaaaaacataaaaatcatgatcaattttagtctgaaagaatttgtagacgaaaacattcagattttcgatccgcaaaatccgcaggaccttattaaagctgaaaaactgctgaaggcagaaagtaagctgaaccgaacttttaccatcaatgaaatcgaagattttttagaatatataaaaaacaacaaacagcatttcgatcgaattcttaatctgcccattattaaaagtatttgcagggatatttatcctgaaagtctaaatatcaagcccgtttttgaaaatatttcggaaagcgagattgaagaattcaaggaatttttcacatcttatctgaaagatttcatttctgttagtattcgatataataaatggcagcatctcatcaatttttacaatttttattttcaattttttaacatggaaagtctggattttttaaaaatacagcttcatgataaaaataggcttatcattgaaggaattaaaaaagatataaatttttctcttttcaaaaaaaattatcctttttcatttgataaaaaattctatttactgcaatcctctattgatgatctcgaatttgatgatgatatttttaagatcagcaatagttatggaaaaaatcatggtatatcaatcgataaaaaatgatatttggggagatctttatggctgctttccattttaacgcatcaaatttatttactagaatcattattaaaagaaatcgtaaaacggctaaagaatggataaatcaagagaaaggtatattaaataatcttgcatatgatcttgcccactttttcgtaaaagatgaaaatgcaggatacattgtgttactctcaattattattttttgcttctattttctaagctttttctttgtggtttcaattaaccgcaaagcatatattttttattctgtaataaatatagtggctttatatgtgtcaaacagaaagcttagataccattacagtcttttcaatcctgaaaattctatccataccatgggtaaggtttccgccatactattaaataccattattattaattttgttttattactaattgtgggattaggactaatttgttttgtcgattgagttttcttaatgaaaatttcagattatttttggaattatatttttttaattaataatgattaatcttcaattattggatgtcgtaaaagaaactctgccaaactttgacggagaaaattcttccgacctcatcaaagcggaaaagatcttaaaagcgcaacagaaaattgattcagatttttcattaaatgatattgaaaactttatttcttttttcaaagaaaacggtaataaattcaatattctttttgaggatgaaaatcttttcagcatatttaaaggtgagtatttcaatatcaattcgtcacacaacagggtttttccgaacatcatgcagattacgccggaattccgaacattttgtgaagagcctataaaaaaatacattcagctcaatatccaaaataacaactgggaaaacctgagaattttttataaaaattattttccggtgatcactccgttaactaaggaatttttaattgatcagatcagccagaaaaataaactggtacgatcgattattccagaacctaatcactacagttaacgtgaattcggagaaaaacatgaggtgcttaatgtctaaaattaatattttagaattgaacaaatactaaaacacctcatgaaaaacaaagatatgctttttgacgaaaatctattgatagannnnnnnnnnnnnnnnnnnnnnnnnnnnnnnnnnnnnnnnnnnnnnnnnnnnnnnnnnnnnnnnnnnnnnnnnnnnnnnnnnnnnnnnnnnnnnnnnnnnccctcccaattgtatgttttcatgcctccaaatcttggaggcttttttatggttcgttcttattacccttctgaatgtcacgctgattattttgactttgagcgtatcgaggctcttaaacctgctattgaggcttgtggcatttctactctttctcaatccccaatgcttggcttccataagcagatggataaccgcatcaagctcttggaagagattctgtcttttcgtatgcagggcgttgagttcgataatggtgatatgtatgttgacggccataaggctgcttctgacgttcgtgatgagtttgtatctgttactgagaagttaatggatgaattggcacaatgctacaatgtgctcccccaacttgatattaataacactatagaccaccgccccgaaggggacgaaaaatggtttttagagaacgagaagacggttacgcagttttgccgcaagctggctgctgaacgccctcttaaggatattcgcgatgagtataattaccccaaaaagaaaggtattaaggatgagtgttcaagattgctggaggcctccactatgaaatcgcgtagaggctttgctattcagcgtttgatgaatgcaatgcgacaggctcatgctgatggttggtttatcgtttttgacactctcacgttggctgacgaccgattagaggcgttttatgataatcccaatgctttgcgtgactattttcgtgatattggtcgtatggttcttgctgccgagggtcgcaaggctaatgattcacacgccgactgctatcagtatttttgtgtgcctgagtatggtacagctaatggccgtcttcatttccatgcggtgcactttatgcggacacttcctacaggtagcgttgaccctaattttggtcgtcgggtacgcaatcgccgccagttaaatagcttgcaaaatacgtggccttatggttacagtatgcccatcgcagttcgctacacgcaggacgctttttcacgttctggttggttgtggcctgttgatgctaaaggtgagccgcttaaagctaccagttatatggctgttggtttctatgtggctaaatacgttaacaaaaagtcagatatggaccttgctgctaaaggtctaggagctaaagaatggaacaactcactaaaaaccaagctgtcgctacttcccaagaagctgttcagaatcagaatgagccgcaacttcgggatgaaaatgctcacaatgacaaatctgtccacggagtgcttaatccaacttaccaagctgggttacgacgcgacgccgttcaaccagatattgaagcagaacgcaaaaagagagatgagattgaggctgggaaaagttactgtagccgacgttttggcggcgcaacctgtgacgacaaatctgctcaaatttatgcgcgcttcgataaaaatgattggcgtatccaacctgcagagttttatcgcttccatgacgcagaagttaacactttcggatatttctgatgagtcgaaaaattatcttgataaagcaggaattactactgcttgtttacgaattaaatcgaagtggactgctggcggaaaatgagaaaattcgacctatccttgcgcagctcgagaagctcttactttgcgacctttcgccatcaactaacgattctgtcaaaaactgacgcgttggatgaggagaagtggcttaatatgcttggcacgttcgtcaaggactggtttagatatgagtcacattttgttcatggtagagattctcttgttgacattttaaaagagcgtggattactatctgagtccgatgctgttcaaccactaataggtaagaaatcatgagtcaagttactgaacaatccgtacgtttccagaccgctttggcctctattaagctcattcaggcttctgccgttttggatttaaccgaagatgatttcgattttctgacgagtaacaaagtttggattgctactgaccgctctcgtgctcgtcgctgcgttgaggcttgcgtttatggtacgctggactttgtaggataccctcgctttcctgctcctgttgagtttattgctgccgtcattgcttattatgttcatcccgtcaacattcaaacggcctgtctcatcatggaaggcgctgaatttacggaaaacattattaatggcgtcgagcgtccggttaaagccgctgaattgttcgcgtttaccttgcgtgtacgcgcaggaaacactgacgttcttactgacgcagaagaaaacgtgcgtcaaaaattacgtgcagaaggagtgatgtaatgtctaaaggtaaaaaacgttctggcgctcgccctggtcgtccgcagccgttgcgaggtactaaaggcaagcgtaaaggcgctcgtctttggtatgtaggtggtcaacaattttaattgcaggggcttcggccccttacttgaggataaattatgtctaatattcaaactggcgccgagcgtatgccgcatgacctttcccatcttggcttccttgctggtcagattggtcgtcttattaccatttcaactactccggttatcgctggcgactccttcgagatggacgccgttggcgctctccgtctttctccattgcgtcgtggccttgctattgactctactgtagacatttttactttttatgtccctcatcgtcacgtttatggtgaacagtggattaagttcatgaaggatggtgttaatgccactcctctcccgactgttaacactactggttatattgaccatgccgcttttcttggcacgattaaccctgataccaataaaatccctaagcatttgtttcagggttatttgaatatctataacaactattttaaagcgccgtggatgcctgaccgtaccgaggctaaccctaatgagcttaatcaagatgatgctcgttatggtttccgttgctgccatctcaaaaacatttggactgctccgcttcctcctgagactgagctttctcgccaaatgacgacttctaccacatctattgacattatgggtctgcaagctgcttatgctaatttgcatactgaccaagaacgtgattacttcatgcagcgttaccatgatgttatttcttcatttggaggtaaaacctcttatgacgctgacaaccgtcctttacttgtcatgcgctctaatctctgggcatctggctatgatgttgatggaactgaccaaacgtcgttaggccagttttctggtcgtgttcaacagacctataaacattctgtgccgcgtttctttgttcctgagcatggcactatgtttactcttgcgcttgttcgttttccgcctactgcgactaaagagattcagtaccttaacgctaaaggtgctttgacttataccgatattgctggcgaccctgttttgtatggcaacttgccgccgcgtgaaatttctatgaaggatgttttccgttctggtgattcgtctaagaagtttaagattgctgagggtcagtggtatcgttatgcgccttcgtatgtttctcctgcttatcaccttcttgaaggcttcccattcattcaggaaccgccttctggtgatttgcaagaacgcgtacttattcgccaccatgattatgaccagtgtttccagtccgttcagttgttgcagtggaatagtcaggttaaatttaatgtgaccgtttatcgcaatctgccgaccactcgcgattcaatcatgacttcgtgataaaagattgagtgtgaggttataacgccgaagcggtaaaaattttaatttttgccgctgaggggttgaccaagcgaagcgcggtaggttttctgcttaggagtttaatcatgtttcagacttttatttctcgccataattcaaactttttttctgataagctggttctcacttctgttactccagcttcttcggcacctgttttacagacacctaaagctacatcgtcaacgttatattttgatagtttgacggttaatgctggtaatggtggttttcttcattgcattcagatggatacatctgtcaacgccgctaatcaggttgtttctgttggtgctgatattgcttttgatgccgaccctaaattttttgcctgtttggttcgctttgagtcttcttcggttccgactaccctcccgactgcctatgatgtttatcctttggatggtcgccatgatggtggttattataccgtcaaggactgtgtgactattgacgtccttccccgtacgccgggcaataatgtttatgttggtttcatggtttggtctaactttaccgctactaaatgccgcggattggtttcgctgaatcaggttattaaagagattatttgtctccagccacttaagtgaggtgatttatgtttggtgctattgctggcggtattgcttctgctcttgctggtggcgccatgtctaaattgtttggaggcggtcaaaaagccgcctccggtggcattcaaggtgatgtgcttgctaccgataacaatactgtaggcatgggtgatgctggtattaaatctgccattcaaggctctaatgttcctaaccctgatgaggccgtccctagttttgtttctggtgctatggctaaagctggtaaaggacttcttgaaggtacgttgcaggctggcacttctgccgtttctgataagttgcttgatttggttggacttggtggcaagtctgccgctgataaaggaaaggatactcgtgattatcttgctgctgcatttcctgagcttaatgcttgggagcgtgctggtgctgatgcttcctctgctggtatggttgacgccggatttgagaatcaaaaagagcttactaaaatgcaactggacaatcagaaagagattgccgagatgcaaaatgagactcaaaaagagattgctggcattcagtcggcgacttcacgccagaatacgaaagaccaggtatatgcacaaaatgagatgcttgcttatcaacagaaggagtctactgctcgcgttgcgtctattatggaaaacaccaatctttccaagcaacagcaggtttccgagattatgcgccaaatgcttactcaagctcaaacggctggtcagtattttaccaatgaccaaatcaaagaaatgactcgcaaggttagtgctgaggttgacttagttcatcagcaaacgcagaatcagcggtatggctcttctcatattggcgctactgcaaaggatatttctaatgtcgtcactgatgctgcttctggtgtggttgatatttttcatggtattgataaagctgttgccgatacttggaacaatttctggaaagacggtaaagctgatggtattggctctaatttgtctaggaaataaccgtcaggattgacaccctcccaattgtatgttttcatgcctccaaatcttggaggcttttttatggttcgttcttattacccttctgaatgtcacgctgattattttgactttgagcgtatcgaggctcttaaacctgctnnnnnnnnnnnnnnnnnnnnnnnnnnnnnnnnnnnnnnnnnnnnnnnnnnnnnnnnnnnnnnnnnnnnnnnnnnnnnnnnnnnnnnnnnnnnnnnnnnnnaacattaatcctattgctgaaaagttgatctccaccagtgcttttgtcctcttcggattaacgtgcataatttattaaaatatatcctgaatttcaccaactatttttcagtacattacctttttttaacaattctgccggatacatctagaatctctgcacttacgccggaagtctgaataagattaaagcttacttttgcttcatccgctataggattgggcgaaatggtaagattgctgaactgacctccagtctcaaaacttacatcatccactcccagtgttcctgctacaaaaatatttgcggttgctgtataacctgctgaagtacttcccgaaacagtcataagttcagaagcataagaatcactaaaaaccatatcatttgtgtttgtaacagaatttgttccgctagtcgcataataagtatttactgttgtattgattgcatcgggaaacgcaagttgggttgtcagtaaaaggttgttggaagcatcatagatctgcacatggatatgggtagcgcggggagtataccatcccggatagatagatgtaaaggttacctgtccgtttgcattggtatactgaatgccgcgaagccaggtttgtccagtagtgttctgtgttccgtcaattcccggctgtccggaataagcggaataatatcctcttttgttacaatgccagatatctacacggtatcccgatcctactgcaaggcaattgttattggtattcagaacagttatcgtaagagtaagcgcaataccggtttgtgttccttcggtaatatttgttcttactaaggtagaagtacttacactgcttggtgtaggatacggacctgccgtttccgaagctgttgcagtacaggataaaagatcctgattagaaggttcatccatgatgtctcccataatattcttaccggtgaatgccattaacggaacagatgctcctacgataccgatactttttagaaagtcttttcttttcatgtgtgttattttaaaattagtataatgtgcagacaaataaaaaaaagagattaaaggcagataattctttcctttaaattctacttttttaattctacaaatatatttaaatttatcatatttttaaatatttatgaatttttaatattcttatcataataaaaacaatgaataattgaattttattattaagaaaacctacaatcattgaaatttgcaaaattattttattaatttgtttatcttgtttttacgtcaaattattaatttaaaattaacaactgagcattcactgtttttttattacagttaaaaattcttcacaaatcctattcctacatttcctttctgatagtaaggcatcatcattgcctgggatttttccggattcccgcctaacagtttattgattttcggataaagccaatatgccagttcagtagacaaaataccgaatcctgcgccaccgattacgtctccaaaccaatgcttgtcattcagcattcgatatactcctgtaaaaacggctaaagaatatcctgaaattcccagcaaaagattgcggtctttatattctctgaacatgaactgcgccgaagcaaaagcaatggctgtgtgtccggaaggaaaagaaagcctgttggaattatccggtctttcttcttttacggcgtgcttcagcggaatagtgatggcagaagtgatcatcatggaagttccgtagataatgcttctgtccctgaaattatgttttcctttcactccgaaagcattgagtccgtaaaccaaaactgcgggagcaaactgtgtgtagttatctagtttgatatgatccggcttatgttcgctaatttcgtattgtgtggaagaattcagtgtctttagttcgtcaatactcagactggcaattccgtaggaaataagtacggtaggaatgatcagttttttataactgaactgatgggtcttatcttcaggcagacttttcagaaccattgcagaatctgcattgtctttaaactgcagactgtctgtttcctgagcgtagatagattgaaaactacttacaactaaaaacaatcctgcaaagaattttctcataagacaaatgatttaatggtcaaaaaaatagatttgtattttctctcaaatataaaggaattacagatagtactaattcaaaaatttaaaactaagcttaattcttatccaagctaaataaaaataacccacacaaaaatgcatgggctaaattgattattttaaaataaggtaatgctttatccattaacaacgattcctccattgggatgaaaaacctgtcctgtaaactgagctgcctctttacttgccagaaaaagaaaactggtggcaatttcttccggcgtagcatttctttcaaaaggtggcttatttttatcctccttttcctcatcaaaggtttctttggttaaaggtgttgttaccggtcccggagctactgcattcacgcggattcctttgggttttgcctgtaacgccaaagatcttgtaaaagaaacaatagcacctttcgttgctgaataatccaacaattcaggatgtccctgatacgccgctgccgaagtcgtattaataatggaactcccctctttcagatacggaaatacaactttggttaacaaaatcattccgatgatatttgaattgaatgttgtccggatatttttttcttccagttcttcaatatttttcgaaggaaactgaattcctgcattattcacaagaatatcgatttttccgaattctgaaattacttttgagtttacctcttcacaaaattcataatcattaatatcccctttgaaaacagagcattttctgcccagattttcaatttctgactttgcttcgcgggcatttttttcatccgaatgataaatgatcgcaatatctgcgccttcttcagcaaaaagcagggctacagcttttccgattccgctgtcggctccggtgataagaacggttttactgtctaatttcaattctttcattattcaattctttcattattttaaaattaaaagctggttgatctcacttttaaaacagcctaaaataaattcggtatagtacaactgagcattcagtgcctgtgtttttgggtgaagttccagttttttagtcagtacaatttctcctttgtacgagaaagaaaagtaggcaaaaatcttatacgaggaattacggatcggcgtacaatatcccgttgtcgcaatagaccagtcggattcgaaaaatttggcgacatttaaagccattgtttctgcgatattttccgacacgcagtcgcattcttcggcttcggcctgatctacgttcagcagtcttactttttcgggtaaagtgtaggtggtcattccgcctttataaaacaatgatgcattgggcatttgtgaaaaggcaagctgtaaacagccggaggtaacgctctctaccacagaaatggtttcatcagcggttatgagcgactgactgatgtaatctaaaaggtttttttgaaattccataatctttactattttaagtggttgtggtgtgtataaaatttctgtctgtgcagattaaaatttatgcatttctttcagcttcaagctcccagactctgtggttggcaatggcttccgtaaatttatggtcaggatcagaattttcccaggttacaatggcaggatcttcatgctttttcattgcaacattgctgtttttataaattgcttctgtgccttccccaaaataaattgctttacagtgttgatatgcttcattgatgaactgtaacattttgtgtttgttttctgcgttcataagctctttggctgcctcttctcccgctccgataaacaaggcatcaaaacatacgcttgccgtgcttgtaagagaatgtttcggtgttaaagcatctcctttatctgtctttaccggagccaaacttggtgcgataatttctacaactgcattctgatcttccagtttattttttaaatcatttataatgccaaaatctgctccactggcaacaataaagcctatttttcttccctgaattgtattttttacagtatttgccatactcagggcttcagaagctcttgtatgggcttctctttcttcactttgcagatctgcagggttgctgtctgccggaagactctggtttggaaattccagctcatttacctcaacgcctacttttgaagcaacggtctgcgccagagatttatcaataaaattaagctgtccgaccactctttcccgaatttccggaatggtaactttcgacagttcaaaaatcagggcgttctgaaggtgtgttttttcataatcggactggctgttgtaaaataattttgcctgtgagtaatgatctacaaaactttcgcttcgggctcttatttttgtccctgaaactctttcctgatgtgaggcaaatcctccttccgacatcattgcctgaaaaggacatcctcctccgatagaattgggttcgtagcttacttttccttttacgatctgctgtctcatgtgtccgtcgcgctggttgttgtgaacggtatttacagatctgttgatcggaatttcatggaaattgggcgaacctaatcttgaaagctgtgtatctgtataggaaaacagtcttccctgcaaaagaggatcattggaaaaatcgattcccggaaccagatgtcccggatgaaaagccacctgctctgtttctgcaaagaaattatccggatttctgtttaatgttaaggttccgaaaatttctaccggcacttcttcttcaggaataattttcgtaggatcgagaagatcaaaatcaaatttatcttcgtcttcttcgggaattaattgtactccgaaatcccattccggaaaattaccgctttcgatggattcccaaagatctcttttgtgaaaatccggatctactcccgaaattttctgcgcttcgtcccaggctacggaatgaacgcctagttttggcttgaaatgaaattttacaaaatgggcttttccttcatcgttaataaatctgaaggtatgaacgccaaaaccttccattctgctgaaacttctcgggattgctctgtcgctcattacccacataatcatgtgcatactttcgggcatcagagaaataaaatcccagaaagtatcatgcgcagaagcagcctgtggaatttcattgtgtggttccggctttacggcatgcacaagatccggaaatttaatggcatcctgaatgaaaaaaacaggcatattgtttcctacaagatcataatttccttcttctgtataaaattttatggcaaagcctcttacgtcccgagctaaatctgtacttcctttgcttcctgcaacggtagaaaatcttacgaaaaccggagtttctctgtctgtttctgttaaaaatttagcttttgtatattgtttaaggcttttcttcagcgtaaaaacgccatgagctcctgatccgcgtgcatgaacaattctttccggaattctttcgtgatcaaaatgagtgatcttttctctcagaataaaatcttccagtaaagtggctcctctttctcctgctgtaagggaattctggttatcatttattttaagtccctgattggttgtaagttttgtatcgtcatttgatgtggtgtgcgacgcgagctgatccagcttatcattcgtcgtttttttgtctttcataattttactattttgtggtttatctttttcaagatggcttgtgtgtatctttagaagtttcttttagttcttcctttttcatttggtctgaagcattcatcagtgcattttctgcaaaataaatatcttttattgctgaaataaagaacctgtgaagcgaagaattctccatttcattttcattcacggcattattttctgtctgcctgcttttttcagatgaagaatctgcggcgttacttttatctttattatctgtggttttggctaccatgatttttttggtgtttgatgttcattaaagattaccttccttcataatggcaaataaagaggtaatccggaagagcattatgtattaaaaactcccccgaatcctgatctgataacattcaggatcctgctattttcttatgttgaatttgatttaaagtatttacaagatccgctttgaaagtgtgatctgtaaatatccaaagtaatgtaagtgaaacagataataaatctacgactgaaaatgtgtcgtttttatgacttcagtcatattgatctgattaatataaaatttttcggctttctatttttaaactgccttctttttccatttttttaagggttctgatcaccgtttctacgcgtaatccggtaagattggcaatctgctgtctggtaagatccacatgaaaacactgttcgcagtctccttcatgataacttttaagataatccagcagacctttcagccttacagcaggattctgggaagacatattctgcagcatgatcgctttaaaatacaatctttgtgaaaggcaggagttcatttctaaggaaattttcggatttttttctaaaagttccatgaagtttttctttgcaagccttatgatttctacatccgtcatgcatattgcattcatcacgtagaatttttctaaaaaaagcatgggatctccaaagctttgtttttctcctaaaatattatggataaactctttgccttcttcattatagctgttctgctttacttttccttttacaatctgatagtaatataaggcatgatctccttctttatagattatttcctttgctttataaaacctatcttctgctccgaatgtatataataattcaggatcaatattcatgcagcttatagttttcatatttttagaattttaacaattcttctacaaaaaaaagaccataaattctatatttaatacaatattttccgttttctgatttttacgactttttctttccataacttttttttgttttatggcggtttatacataaaaaccatttactaattaaacccgttttttttgaattgaaaacgggtttttcatttaattatgtaaaatttattttgccgtttttgtactgtctcctttcctgcggaacgtaccgttttactgtctgccaaaggaatggaatcattagacattgttgtggttgcattaacagaagaatccgttatcgtggcagaatcatagccggaaccggaatcggaagttgttgagttttcttttttctgacaactccatacaagaagcccaagaagggcaattgacaggatacatttcataatattatattttaagtggtgtgatctttcaaaagtaggataatattatgttaagtgtttatgacttcggtcataacaaaaatgcatactcaaaacagagatctgagaataattataaattaacctaagttcaggataagataaatttaaattgattgtccgtttattaacctaaagcttcgacaggctcagcttgacatcgctaaaaatcaagcgtttggtattagaggtgtcacactgagcttgtcgaagtgcctgttataaataattgattttcatatcagtgcaaagtaataggttgtttaacggatattcaaaaatttaaataattgatttatagaattatattaatttatcgcaaagaaaaacaaaagattttttttaattattgaaagtttgtaagctaaacaaaggcacttcgtttatttaaaaaagacaaacatggtattactttgataagttttacgccttcgtatatcttaaaagctgaattcctgataattgaatctctttgtttaaccttgcggttaagaagacttatcccgaacttaggctaaactaagagatattttttgagattatttgctgtccggaacgaaattttttcttgccagttcttttctaacgcggctcagactttccggagtaatgccaagataagaggcgatcatccactgtggaaccctcaaaagtaaatccggatacattttgatgaacttcatataccgttcttccgcagtttcagcaagaagggaattgattctgtcctgaagacttttaatatgtttctgaagaagaatatcacttttttcgaggctgtcggggaattctccgatcagtttgttgatgaaatccggatgcagcagaagcacttccgaatcttctacggcttcaatatagtaaacagatttttcattaaaataaagactgcttcggtctgaagtaagccagctttccggcgcaaactgaatgatatgctctttcccgtttttatcgatggaatacattttcaaaagtcctttttctacaaaataaatatatctgcagacttccccgtattgtaaaagaaactgatttttctgcacttttttcacttcataatgcagactgcacatattcactttttctaaaggaacatttaaaactcttgctaaataattattgatattcgtcattatataatttggtctaccgatatactctggtgtgaagcgttattaatggcttttccgttttctatcacaatcagttgcggactttggtgcgttactcccaaatcttctgcaatcttattggaaatcggtctgtgagccagcaaatctaagtaatataaatctattttctgatccagattttctatttctttttcaaaatttctcaacacggttttgctgatgaagcaacttgttgaatgcttgaatattgcaatcctgtgctgaaaagaactttcaacggctttctgaaggtcttcctcggattctatctttttccagaacgatttctgttccgtagtctctccttttcctccaaatatcttatcaaaaaaactcatgtcccaaattgttttaagtgatgatccagatgtttatactctaaaaatccccagtctttctctttcattcttccaaaaagttcgtgatgaaggggtaaatttccgttttcaaaatgatggcggtaatcgcagagtgttttcagaaggttttctttttctgcatcaaaatcacactcaaaattaacaataagttttcgaaaagtcggcatatttcggggaattccgttgttaaaaatttgcatttctatttttgtggcaattcctatccaccgaaaaacactatgtatcgaaggaagtattacctttttctgcggaatcaacagtacatcactgcaatgcctcatcatctgactgacggtcatttttccccatttttttggcgaattttcttttaggcatgaaattctgtttataatttccttaaaatcttcaggattatggagacttttctttaccaacctttttctttcttcagattttcgatgtgcgcaaaatgatgattgcaatgccacgcgtacaacgcaagataacttctcagattatagtttttattgtgttccggatgatgaaaagttctttcaaactgtttgttggtcatgcttttcagtaaaacagtccatctctggtgtgttcctttcagcattctcatggcaggttttaccggcatcgtaagactgtcctgaagttctgcccattttgcttcatcataaggtcttatcgtaggattttcttcagtaagtgcaagtttcagacgcataaaactgttgatatgactgtctgccaaatgattaacaacctgtcttaccgtccatcctccttccctgtattgggtatccaactgttcatcactgaaatgttctataagatttttaagtcttcccggaaaatctttaatgactttgatatattcatcaagcttaatgtcgcagatattttcagattcctgaaactgtcctatcggatatttcttttgttctaaggtgttcatctttaattatagtttttaatacgctaaacagaataacggcgtctttatcttttaagtagtataatattttatttttataatgatcttctcttgagaaaatcataaaatgatggcgatattgtttcaattccagatcttcaaacagaatttctttcttattgaatctgattctgtcttcatcaatttctattcctgaaacattgattttctcgttattcctatattttaaaagataattatgtacaatttcattaatgaatttttcccacaattcatcaataatatcacaatacaactgatgtttttcgtctaattttcttctgtaaaaaagtttgaaaaatattttgagttctttgtctgatttatttcggataaaaatctgatattctcttccgatggtaaatttatatccgtcgatgaagtgaataccgtaacgaattccggcaatatcctcctttttgatgatggtaaaaagatcattcttttgatctttattttcaaattttataaaattatcgtcaataattaatgatcttttccggttatccaacaatccgcgaacaatggtaaattctttcataaaatgccggtttgtctgaaattattgttcagactttttttgaatattagtttttgtaaatttattaaaatttaaagaaaactgaatatgaaaaagaattaaccaatgaaaatctttgattttcttcttattctatcttttgcaataaaatgcctctgtcattctgcatggaattttgcgcagcattatgcaatgaagaatctcttaaaacgttgtgattttggatctttcggcttcacttcgttgcgctcaaaatgacagtgttgcaaattaataagacaaaagatttggtgctttattaaaagttaacaagcgtaagaagaaatgagcacaacattttttaaaaatctttgatcttttacttttgagcacttttattgtcttgaacttagctttgtcattcgcttttgtggttaaataaaaaaagcctcaattttaaaattgaagccctgtattttattaataaccgtgcagattaacatcctccgttctctgtagagtcactttccttcccattttcttttggattacgcggaaatgctgcaattcgtcatccgttaaaatagtaatcgccgttcccttttcattggcacgtcctgttcttccgattctgtgaatgtaatccaaaggcgaacgcggcaattcgtagttaatgacgcatcgtaaagattctatgtggattccacgaccaatcaggtctgttgcaaccaaaatctgagctccgttcgatttaaattcttccagattatttcttcttgctccctgcgatttctgactgtgaatggcaaccgcttttattttgtttttctttaatttttcaaccagattatctgctgctcttgtggatgacacaaaaaccaaagctttctccacctttttttctttaattaaataacgcaaaaaagggcctttattttccggagccacatgataagccaactgctcaatattatctatttcaacttcctcttttttgatctcaacaatcgtcggattaattgataaacgctctttcatctcagaaactttatcattcaatgtggcagaaaacaaaattgtctgtctggcaacaggcatcattgcgaaaagcttattcatctcttcaccaaagcctaattgaaacattttatccgcctcatcaatcacaagatgctgaattccggaaatgctcaacgcattatgatcgatcagatccaataaacgacccggagtggcaataagaacctcaaccccgaacagacctttcatctgcggattgatggaaacaccgccataaactgccatggtacgaacttcacgctttaaattgtctgtaaaagccctgaaaacctcatcaatctgaatcgccaattcacgggtaggaactaatataagaacctgaacgttacggtcttttttaacctccgtgttttgtagtttttctaaaataggcatcacaaaacaagccgtctttcccgaaccggtctgtgcaattcccatcagatcttttccctgcaaaataacgggaacagcctgctcttgaatggggaaaggtttcagataccccagttttttaacggaacgaataatattgtgcgataatcctaaagattcaaatgacataaaaaatttaatttttgcaaagataagttattagaatttggttttgcgcttatttgttggcaatcccgaacacgcaagaatttatctgcgataaaacagttgaaaatttgttgatgttcttaagactaaaaacgagataacttttaaaaacagtcagcaactttacgattaccaaaaattaaatcaaactctgtcaaaaaaaatattaaacaaaatgccgatttgtccgataattctgttttggacaattttttgaagctaagaattcgtagatttatcaaaaatttcgagaattttaaatatgaaaaaagcgttaataatcgtagatgtgcagaatgatttttgtgaaggaggagctttggcagttccgggagccaatgaagtaattccttacatcaatgctctgatggaagaaaacgaatacgatcagattgtacttactcaggactggcatcctgcagatcataaaagttttgccagcaataatggcagaaaagtaggcgaaagcattattttaaatggggttccgcagtttatgtggcccgatcactgtattcagggaacttttggggcagaattccataaagatcttaacagagataaagtaacccacatcgtacaaaagggtaaaaatgtagaaatcgacagttacagcggttttcaggacaataatcatttcatgaaaacaggtttggacgattttttaaagtttcatgacatccagttggtggaaatcgtaggtcttgctatggattactgcgtaaaatatacctgtaccgatgcggtatccaatggttatgttacctgtcttcacttcaacggaacacgtgccgtaaatgtaaagccggataacggaagagatgccatttatgatatgatccagaaaggggttacggttttgggatagttttcaaacacaaattgtactaatgctttttcacaaatagcacaatttaatattaaacttaataatgaagttgtttaaagtaaaagagtttgctcctttaggagcagaatctgtgtagaaataagaataaatccgtcaatcaatccataggattgatatcttaaatacgatacattttctaaagacagcgttcctacgggacgtagaatgccttgcgaatatgttgtctacacagataaaactctacagagttttctaccattttactttaaacaactttaatataactatcgcaaagacgcaaaatattctttaatactgtcttttcttaaggcgcaaaaattttatatacgataaaattaagcattaatccttcttgaaaagcgccttaaagattggagactaataaaaatcctgcgtctttgcgctttccaacaagaatattttattgataaaaaagttaaaataagttcattgtgatatttgtgaaaaagcattcgtgacattcgtgttaaagcaaaaaaagacgctgaaaaaaaaattcaacgtctttttatttttatcttaaaatttacttcaaaattaaagcattttaagattattcacttcctgctctgtaaggattctccagtgtcctcgcttgatgttcttcttcgttaatccggcaaacattactcggtctaaggcttccacttcatatcctaatctctggaaaattcttctgataacacggttccatccgatgtggatttcaattcccacttcatttttcggctttccttcgataaatgaaatctgatctacctcagcaactccttcatcaagacggattccctctgcaatgagtttcatatcttcgtgagtaagctttttatccagtgtaacgtgatagatcttttttgcatcaaaagacgggtgcgttaatttcttcgtcatgtgaccgtcattcgttaaaagaataactccggttgtggaacggtctaatcttcctaccggaaaaactctgtacggtgaagcgttcgctacaagatccattactgtttttctggctttgtcgtcttttgtggtagaaatataccctttcggtttgttgaggagaacataaaccggtttttcaggcgtaatgttctgtccgtcgaaaaccactttatccgttttctgaacctgatatcccatttctgttaccacttttccgttcacttccaccagaccttgcgtgatcagctcatcggcttctctcctgctgcagattccggaattggcgatgtatttattcagacggatggtgtctttatgtacatccttctcaattttagacagtcttcttttctgtacaaaagatttatttttatcctctctgttttctgttccgggtcttcttccgtatttcaggcttcctctttcgtatttatctctcgtatcaaaagtattgggtctgcttcctcctctttttggggcagatttgccgaaagattttttttcttcacctgaattggtgataaaaggctgctgttccgtttttccgaatttcttatccattctgtcctgataacttgtaccggtacttcttctggagtctgaatttctttcgcctgctttagggaaagattttttaaaaggttttgattctgaagaatttccagatctggaagcacgagaattatcagaatttttcttagttgaaattcttggtctctttggtcgttctgaattattattatctctgctcattctaaaaatttctgcaaagatagtatatttaataacgagttaaaaattaagaatcataactttgcaatatagttttacatttaaccctacagaaaatctgaaaatgataacaatattaaacgataatttttctcaattaaacgacttcttacacgaaaaatctttcagcaaaatctttattctggttgatgaaaatacgcatgaatattgtctcccaatccttttaggaaatatggaaacggatcttggctttgaaattctggagattgaagcaggtgaagaaatgaagaatatacagacggcgaaccagctttgggaaattctcacagaaatgcaggcagaccgaaaagctctggttattaatctcggcggcggcgttattacagatatgggcggttttgtagcatctacttataaaagaggaatacagtttattaatattccgaccacacttttatcgatgtgtgatgcttccatcggaggaaaaacagggattgatctgatgcattataaaaatatggtggggacttttacttttcctgagaaaatctttgtttatccgaaatttctggaaacgctgccttttaaagaattaagaagcggatttgccgaaatgctgaaacacggattaattgccgataaatctcactgggaaaatctcacccaaattaataaactggatattgaaggcgtaattcctcatattcagacgtcgatggatattaaacagaatgttgttcaggaagattttcacgagaaaaacatcagaaaaacactgaattttggtcatacgatcggtcatgccgttgaaagtttatgtttaggtcagggaaatcctattcttcatggggaagctgtggcaatgggaatgattacggaagcgcatcttgcttatcttgaaggtttaatttctgaagaagacactacgattattatcgaaagcattcaaaaatactatccttaccttgatatcagcgattttaaagacgaagctatttttgatcttttactgaatgataaaaagaatacggacagcaagatcaatttctccttgattaccggaatcggagcgtgtaatttcgatcatcagtgcagcctgaaaaacatcacggcttctttagatttttacagaaaactgaatgatgtttctctttaatttttgaaaattctgataaaaatctaacttattttcagtataattcagaatttagattatttctaaacaaatgtttaattgaaaaattaaatttctgaaaatcaaaatattaagataaaatccgtttgtttttacaggcggattttttcatgacatttatcataatctgttttttggcaagcaatttgaaagatactctccgtcaaacgaaaaaattgacagtagtaaaatttaaaattagaaatagtaaaaattaaaaaattaaagttatgaaaaagttaattttaggagtagcacttacagctggttcattagcattcgctcagacgacgggttcatcttcaagcccggtaagatttggtatcaaaggtgggatgaacgtagcttctctttctaaagatgcaagtcttgaagatcaaaaatctaaaatcggatttaacgcaggtgtttttgcaaacattcctttagcaagttcattcagtgttcagccggagattttatattctcagtacggagctaaagtaaaaagcacagatgaagttacagttcttaatacaacaacaagaaacgttgaatctttttcaactcacttagattatattgctgtaccggtaatgttccagtataacttcgttcccaacttttacgttgaagcaggtccggaattcggattcttagtaagcgcaaaaaataaatgagacagaactacaactgtaaccaatgcttcaggaacaacaacttcttctgcaagctatacagatgatatcaataaagacaacctgaacacatttaacttcggtattggtttaggagcaggatattatttcacagataacttaggtattactgcaagatacgttgcgggtgttacagacgttgctaaagacagaccaagcggttctgatgcaacaagaaacaacacattccaggttggtttagcttacaaattctaagaagctgattcagtaaaaacaattttgatttcaatacataaaaaggtcaggtttcgtcatgaagcctgaccttttgattggataataaaataccattcaacacataataattcactccaaaatttgtgaattattaacatttaaaaatcggaaaatcctttatttggcaagcattttgtaaaataattgttacctgaatgaaaatttcaggaaacaaaaaagtagtaaaatttaaatgtaaaattatgaaaaagttatttctagcaatggcagtaacaggaggagtatttgtgtttgcacaggaagtaaaaacaacagctacaccaccggtgaaaatgaaggagcctgtaagatttggtattaaaggagcggcaaccgcttcccaattcagcgaacaggaacttacagccaaaaaccagaaaataggatttaatgcaggtgttttcgtaaatgtcccattatctgaaaagtttgcattacagccggaagttttatacaaccagatgggtgcaaaaagtgtactttccgattcggaagttaccacaggaactactacggtaagaacaaagcaggattacagtactacgctgaactacatttccgtaccggtaatgcttcagatgaaacctacggataatttctatgtagaagcaggtccggaagtaagttattttgtagacggtaaaaacaaaggtgaacagactattgccacaaccactgcgggaacaaccactacacagactttatcagcttcagaaagcattaacaaagacgatattaaaaagttcaatttaggttttggagtcggtctgggatattatttcacccgtaatctgggcattaatgcgagatatgtaaacagtcttacgcacatttacaataattctgatgcattaaccgatgctcagaaaaatgtaaacacaaacagatcatttcagttagggctgaactataagttttaaataaaaaacaatttttgatttcataacaaagatcaggtttcatcatgaggcctaatctttttctttttattaaatttgcagcactttaataataaacattcataaaaattaatagactatgaaaaatatttttctaggacttgcgattacagcaggtacattatcatttgcacaggaaaaagcagcagcttcagcttcaccggtaaaattcggagtaaaagcgggacttaacgtatcttctattaacgacaacgattctaaagcaaaagcaggattctacggaggtttctttgcaaacattcctgtagccagttctttcagcgtacagccggaagttttgtataacggaatgggtgctaaagacaaaacctattcttctgtaaagcttaatttggattatatttcagttcctgtaatggtacagtacaatgttcttccggatttatatgttgaagctggtccacagttcagttttgcaatcagccagaaattaaaaggagacggaggttctgtagatgtagatcaggctttcaaaggttttgatcttggtttaggtcttggagcaggttattattttgagcagaaattcggaattacggcaagatatgttgcaggacttacggatatcgcagaaaacaatacaggtgacgcagtaagaaacggcgttttccaggttggtgtagcgtataaattctaagcaatttaaaacagaataaaaaatgtcagacttaaaaatttaagtctgacatttttcttttttcaggaatattttaattgaataattctacctcctctccttttcctacaggatattcttccgtgaaacacccgaaacagtgattggcagagcctaaaatttctttcagattttcaacgcttaaaaattcaagagaatctactcctaagtaatctctaagttcttccgtagacatattggcagaaatcagatcgtctttcgacggcgtatcgattcccagataacaaggagcgataatcggcggagaaacgcttctgaaatgaatttccttcacgcctgcatctttaagaatcttaacgagtctttttgaagtggttccgcgtacaatggaatcatcaataatcacgactcttttatctttaatctcggaaataatcggattcagtttcaggttcactaccctttctctcatttcctgagtcggtacaatgaaacttcttccgatgtatctgtttttaattaaaaccggacggaaaggaattcccgaagccttggaaaaaccaatggcagccggaactccggaatccggaactccaatcacaacatctgcttccacaggagcctgatgccagattttttctccggatttttccctgatttcgtacacattaatattttctaaagtagaatcgggtcttgcaaaataaatatattcaaaagaacagattctctgctttcctttttcttcatctaccatgtaagaatgaagttttccgggttcgttttcattggtataaataatttctcccggtaaaatatcacgcacatactgtgctcctactgcatctaaagccacagattctgaagcaacaacgtaagaattttcgttaattgctcccaaaaccaaaggacggattccgttgaaatctctgaacgcgaaaaatttatttctcgtcatcccgacaaccgaataagccccttcaattttctccatggttgctttaatggctccgcgaagtcccagatcaagatttttctgaatcaatcttaaaatcacctcagaatcggacgttgctctgaacacaactccttccgcttccagttccgttttcagttctttggcattggttaaattaccgttgtgtgcaatcgaaagaataatctggtcgtattcgtttttcgcgaaaaacggctgaaaattatatttctttttgtctcctgcagtcgtataacgcgtgtgtccgatcgcagaatttcccataaaagtttcaggatcgttgatctctttataaacatccaaaaccagaccttcatctttcatattggtgatttttccgtttttaagaacagaaataccacaagcttcctgacctctgtgctgcaatgcaaaaagaccgaactgtgaaagagaaaacgtatccagatcgttatcagaatacattccgaagattccgcactcttcgttcggagcgtctaatctttcctcttcctgtgttctgaagagatttcttccgtaggtctgggtttcaaattgttttaaatattcacttttatgaatgtctaaacttttcatttctattttttctaaattttgatggtggaagccgggagctcgaagtctgaaattcacaacaaaaccattgcctattcagataaacttccggcatccaacttccggcttatgcctgataattatttagcaagtaccgttttcagtctgttatagatctcaacgtaagcttcggtaacttcaccaagatctcttctgaatctgtccttatccagcttcttcatggtatctttatcccaaagtctgcacgtatccggagaaatttcgtctgcaaggataatttcaccgtctgcagtttttcctaattcaattttgaaatccactaagatgatgttcattttatcgaaaagatcgattaagatttcgttgatgtctgaagttaattcatacatttcatcaagctcctcatacgttgcagctcctaaaaacactgcgtggtgatcgttaattagcggatctcccaattcgtcttttttgtagcagatatcgaagatggtaaccggagatttaattccttcttccactcccagtctctgcgccatacttcctgccgaatagtttcttaccaccatttccaaaggaatgatggatacttttcttaccaactgctctctttcgttcagttgtttaatgaaatgagtcttaatccctttttcattcagatattcaaaaataagagtcgtgatcgcgttgttcatttctcctttaagatctacggatcctcttttctgagcattaaatgcagtggcatcgtctttgaaacgcaccactacttcattaggattatcggttgcaaaaacctgttttgccttaccttcgtacaacatttctttcttttccattttctaaaattactttttattagatttatattacttaattaaaattcctgttaaaactgccattccaaagctcagaagggttccgatgagaacgtattcggttaatttcctctgctttgcctgagcaagatcactaaatctgaaaacagattttgcggcgaccataaaacctacgccttcccaatgattaaccacaataaaggtgaaaaccaataaacgttctaagatcccgatatattttccggcgctcgataaagattcggtttgtatgttattctgtgtttcggaaaccggagtccacgaagacaataatatcttgataaaaatggaagccggtgtcgttaaaaacaaagctgccatgatgatttttaaaatttcctgattttttaaaaagtcaaaattaaattcattgaaataaaaggaaactcctgcgataactgcaatatgtaaagcctgatcgataaagaaccatgattttttagattttgctgtctgaaaactaagcttcgcagcatctataatgaaatgtgaagctccaaccagaacggcgatccaccaaaattcggtattccagaggaaaataaaactcagaatggtgtggatgagaacatgaaggtacaaatatctgcttttcagttttttgctttccttctctgcaacccatgaatttggctgaagaataaagtctccaaataaatgcgccaatatgagctgaataaaaaccatgcttacagttcggatattttttttctgaaatattgattggtttctacgatcagttcatagtttgcacgcttcagtctctggcttacagaagattgtgagatggcaaactttttcgcaagatcttcctgcgtgatgtctttattcataatcatctcatgaataatttctgcattggcaaccgtccaggaatcaaaatccttagaagaccatttcagcagaatattaaggtcccggtctacggaatcgttggatgttttaatggaaacggtatgtccgtcatttttcagatcgttcagaagtcttccggaatgcacataagccgttccgttggattcggtgattttttcagatgaaaaattttcttcgccaataccgatggcaattcttacgtctaaattttcctgactttttataagtgattttatggcgagaaaacgccagaatacatcgtctattttacatttgaactgaaattcgtcgcctctgtagatttcccatgtatgaggaacacttccccactgttcgagaagatttttaagcttggtgatccaaacctctgtttccgcgtgctgcgaatttataatatctccggtaatgaccgctatcattctgcaaatataagcattattacttataaataaaaaatataagcagacacacttatagataatgattattagtgaatctgcttatatctataccttataattgactgcatttttgaatctgtaacagaaaatttcagaaattgaccagcaaaaaagtaaaaacacactgaaaatgtgtacagaaataagatttcaaagaataaaaataattttactaaaaagattattttaaatcaaaaagtaacttttgtattctgttgtcatgattttattcaaaaaaaataaattttcctccgataaaagtgaagaactaaaaaaaatatttcgaatatattgtttcaaaccgaatttcggattattattagattaatttgaagtaatttaaatatttaacttaattatttaaatatttaataacatattccaattaaaaaccccatataaataaaataaaacgtattttagtaatgttatcagaatgtatttaaaaaaaacacgaatgaagtttaacctttaaatgcaactatcatgaaaactaaaatgctcttaatggcgctttgtttttcctgctttgtattttcgcaaagccagtatcaaacagagataagtagccaatctaatgacgctgaagtattggcaaacaatactgtaagctttgacagttcggatcttgaactatccggaaaagacggcaccaatctacaggaaacatttctttattttaacgtgaactcgacgctaaaatattgaattatatttagttgtccttggcatctatgcatttatccagttcgggaaatttaccgatggtttttccgggtaaaaacaataggcgcatatggcagannnnnnnnnnnnnnnnnnnnnnnnnnnnnnnnnnnnnnnnnnnnnnnnnnnnnnnnnnnnnnnnnnnnnnnnnnnnnnnnnnnnnnnnnnnnnnnnnnnntcaatagattttcgtcaaaaagcatatctttgtttttcatgaggtgttttagtatttgttcaattctaaaatattaattttagacattaagcacctcatgtttttctccgaattcacgttaaattataatcccataatatattttcaattattgtctcttcatcaatactcgatttgggcatttcatattcagccttattaagtacctttccgtcataaaaaacttttattttcttaatctttggaagcaaattttcagcaaaaaagtttaaacttatttgctctgtttgtgcaaaaactaaatttgtaaataaaagaaataataatatatagctttttttcatcaaatatttaatttatgtattcacaagaaaaaattcgcaatcgtgtaaataattaatcctaccaaacctccaacgattgttccattaacccggataaattgaagatctttccctacttccagttccagcttttcgcttaattcttttccctgccagtttccgacggtagaactgatgaggcttccaaattgatgggtattttttagaatatatttgtaagcggtaacacgaacccagtcgtcgatttttttctgaaaattttcgtcattttttaaattctgtgaaaattcattcagatttttagataaatatttctttaatgaagattcatcgtcctgaagttctttcgttaacgtatttttaatggaaatccagatgtcgttggaatattcattcagcttgtcgtttttgaggagatcatttttaatatttttaaattcctcttcccatttcggatcctgtttgagttcattggagaaatcatagattttctgggtgatcagatttcgtatttcgtggttcggatcttgttcaatctctttgaaaaaatctgaaagtccggtggtgattttatcagcaattttattatccacaaaagcagggataaaagtatagctcccttttttcacgcggtctttaatcatttcatcattttcagcgatgtaatttttaatctgagaagaaagattggtaataatcctttgatgatcgtttttgtctaaaagatagttgattccgttgcctaaaatggcgttcagtttgatagtatcggtcatttcagacactttgttgctgataaaacggcttacttcagaatcatcgagtttatttaaaatatccagaacaatatccgaaaggtttttaagcaaaacatcctgatttttttcttttccgagccattctcccacaaaattcgagatttttaatttctggatataaggtctgatgttttccggagaaagaaaattagttacgacaaaatttcccagattgtctcccagtttctgtttgctgttttcaataagattggtgtgcggaatcggtaaaccaagcggatggcggaaaagggctgttacggcaaaccagtctgccaaagctcccaccattgccgcctcggaaaaggcacgaacataacctatccagtgcgagtctatggttttttgcaataaggtagtcccgataaacagaactgccattaacacaaataatcctgtggcaaatgctttgtattttctgagctgttttcttttggcttcatcattcatatgctcaaatttagtaaatttggttgtgaaatttcacctgttaatattgttgtaaaaatttttaattcgttattttcatttctcaaaggcatcggttttgatgcttacattttgtctttgataaaaatatttaaaattctatggaaaaccaagcaaaaaacaatccatactactccagaacagatacttcaaaactcgatatttccaatgaagaatggagaaaaatcctgcctccggatttatatgccattgccagagaagcctcaacggaaagaccattcaccggaaaatacaatgaatttgatgaattgggagaatattactgtgccgtgtgcggaaaccatttattccgttccacttcaaaattttcgagcagttgtggctggccaagtttttttgaagcagataaagaaggagtgtattacaaaagagatacgacctatggaatggaaagggtagaagtactctgtaaaagatgcgattcccacttaggacacgttttcgatgatggtcctcaaccaacgggattgcgctactgtatgaattccgtaagtctggaatttgttgcagattctgaaaaataatatcatgatgagctatgaaagaagttattaattttgatgaacggaaaccttttgaattgcattatctgatctgtatttggatacggaattaaaacaggattttcatttaaaatatatagctaccacaatatcccaaagctcgtatacttttgatgaggtgaaaaaaattaataagtatgaagtttttcctgtacttttttcaaatttgctgcagcctgcaggcgaatggtttgcgtttgatgaaaggataactataaatagtattatagagtggatagaatcaaaaaaacctttagatttactggctgttgaatgggtttatatggtatataaagacatcaatgaagaatattgggatgaaattgaatatctatataataaaataagaagtagctcattatctggtagttaaaatttcttaaattgcgttaaactttgtggagttattgcgcttaccctaattatgttttatacatttgctgactcaattggatttaacataatagtgaaatagtgaatgaaagcattgtatagcttattaggtgcagcttacatcgttactacttcattctatttgtctccaaaaaaggcaatcgaaaagaatgaaatcagtacaacaaaaattgtaagattagccgacacgaaatctgagaaatctgcggcaacagcagaaagttcatcagaagaattatacaaatctattgttttcgagcagggacacgaacttaatgaggaggtttttttcaaagcagtaacaggttttgaaaatatgaagaaagcaggtttgcttaacggggattcgcatttacttacggtatgcgatttatctatgtcttcgaacacaaaaagactttgggtaattgacatgaatgagaaaaaagtattgtttaattcattggttgcacacggaaaaaatacaggtgaagaatttgctacgaatttttctaacacggaaagttcgttgcagagcagcttaggattttatatcacggatgcaacgtacgacggcgacaacggctattctcttagactacttggaatggacaaaggatttaatgatgcagcctacagaagagccatcgttatgcacggcgcagattatgtaagcgaagaatttgccgccatgcacaaaagaatcggcagaagctggggatgtcccgcagttccgagagatttaacaaaaccgatcattaataccattaaaggaagaaatcttctttttatttattatccggatgagaattacctttccaaatcggagtggttgaaagcataacagaaaagcagtcggtttgactgctttttttatttctattaaattaaaaatttcctgcacgtttgtcattctgacgaaggaagaatctactgaattactattttttctttgattgagagcggatgatatagaattgttttatctgctcaatcttccagagatttattcaaaaagcttaagaaaactttttaaaaatcaacgtggcattgtgtcctccgaaaccaaaagcgttacttaaagcgtaattgatgttcttttctttcgcttctccaaaaacaatattcaggtctttcgggatgttttcatcaatcctgtgaagattaatggttggcggaataattcctttttctatcgctttgattgaaagaatagcttccgcggctccggcagctcccaataaatgtcccgtcatggattttgtagcactgatgtcaagatttttacttcctttaaataatttattgattccgtttaattccaccaaatctcccattggagtagaagtagcatgaggattaatgtaatcaatatcttctgtgttgattcctgcttcatgtaaagccagctgcatcgctttaatggctccgactccatcgggatgaggtgctgtcatatgatatgcatcggctgtcatggctgctcctaccaattctgcataaatttttgcgcctcttgctttagcatgttcatattcctcaagaattaaggctcccgctccttctcccattacaaaaccatctcgttctgcatcgtatggtcgacttgcggtagcaaaatcatcatttcttgtagacatggctttcataatagagaaaccaccgattgaagcaggggtaattgccgcttcagaaccaccgctcacaatcacttttgcttttcctagtctgatgtagttaaaggcatccatcaaagcagtatttccagttgcacatgctgaaatcgttgtataattgattccctgaagtccgaatttcatcgatatcattcctgaagccatattcgcaatgaattttggaacgaagaaaggattgaatcttggcgttccgtctcctttggtaaattccattacttcgctttcgaacgtccacattccgccctgtccggttccccagattacgccggtgtcgaaaggatccatcttttccagttccagtccggaatcttttaaagcttctgctgtggaatacatcgcgtattgggaaaaaagatcacttcttttgatttcgttatgtgttaaatgaactttcggatcaaaatttttaacctcacaggcaaaatgaactttaaatttttctgtgtcgaagtgggtgattttgttagctccgctcacaccgttgatgctgttgttccagaattcttcaacattatttcctaaaggcgttactgcgccaagtcctgtaatgacaactcttttcatttaattgctgattttgaataaattagaggttcctcttgcaattaagcgcgttttatctgcattccagatttcgcactctgcgtttacaaattgctttcctcttttgatgattttcgtttcagctacaatattatcattttcttttgctgttgaaaaataatcgatgctgttatttatggttacgataaagtttttttcatttaacgagaacatagtggctccgataacatcgtcaaaaatggctgcggtaactcctccgtgaagatttcccatgggattcagccattcttcccgtactgtatactgaaattccaattgtccttcttctgccgaaagaacaacaggattcagccatttcataaatggggaaggagatgctgtaaactcttttccgatgaatgattttatgatttgtaatttatccatatgaattatgagatgttttgtttaatttctttgtcgataacctctaaaatcctgtctaaagcgagattgatatatttttcgtcttctgtggttttggataaaagaattccgccttcaatcatcatcaccaataatgaggcaaattcttcagcgttaatttcaggcttgaattctctgcttttttgcccttcaatgataatatttgagatggtttttatccagtcctcaaaagaatgccgtactttctttctaagttccggaaaggagtcactacattctgtcgctgcattcattagaggacagccgccgttttggaagactattttccagttttttctgtaaaatgcaataaaagcatacagtttagcagacatcgtaggatattcttcaccaaaagatttctgcatatttttcttcagcattcctgcattgaactgatatacttcaagagctactttatctctgttttcaaagtttccgtaaatacttcctttggttaaacccgtcgcttttgtaatgtccgaaagggatgtagaggtatagcctttggtattaaacaaagaggcggttttctcaatgatgaattgttttgtcttttctccttttgacatttttctgctgaattcctgcaaagatacaaaaatataccaatcggtatattttataataagattaaatgtatccgtctatattaaaccattaagatttcttgtaagaagcttagattaataaagttgaatattttattttttaaattttggctaaagccttatggtttattttttgaatgaaaaaacgggctgaagcccgttcctattcatgttgatattaagattttaaataatttacgtgaagagcttaattaatctaaacttcttaacaaaaatcttaataattcaaattcttagttcgccaaagtagcttccaaagtaatttcgaaattgaaagctgcacttacaggacaaccttcttccgcgatttttgcatatttctggaactcttcttctgaaattcccggaactttagccgttaacgttaattcagattttgtaatttttcctgcgctcggatctaaagtaataacagattttgtcgttaattcttccggagtataacctgcctgagaaagttctgcacttaatttcatggtgaaacatcctgcgtgagccgctgccagtaattcttcaggatttgttcccactccgtcttcaaatcggctgttaaatgaatattgagtctggtttaaagtggtgctttgtgttgtaagatgtccttttccttctttaatagttccgttccaaacggctgttgcgttacgtctcataatgtttttgttttaatattgttattttgatgtgacaaaggtattgcagatttcgttccagataaatacacaaaaagaactaactattgtacttttttcccgaattgtaattttttttgaaatttgcaggggtacttccgattttttgcgtgaaaagacggttgaaataagccggatcttcgtagccgagatcgtaagcgatttctttcaccggtttatcggtataaaataaaagtcttttggcttccagtaaaattctgctgatgataaactggttaggagattccagatttaaattcttgaatttatgcgtgagtgtctttggagaaatatgaagcagttctgcataatcagccacattatgttttttccggaaatgaagttcaagcaaacggctgaaatcccgaaagatatccagttcgtgtgcaggaatttttatttcatcattattgagattctgctttttccattttctggtggcacggatgatgatttgtttaacgtaggttcggatcatttcctctgcggaagaatctttccattccagttcgtttctgatgctttgaagtaaatgttgaattgcagaattttcttctgcatccagttcaacaaaaggaatttcaaacacattatgaaaaagcagtccgtcgcaggcgacttccttatcatgaatctgaatgcagtaaaaatcacggttgtaatagatcagatgcgattcgccgcttcctttttcaatttgcagatgctggttcgtcagaaaaaataaagccggattttctgttttataatgtctgaaatccacagacaagtcatatcccgcaggaatatagaaaattttaatttcagatttgtatttgttgtctttaaaatcgtgcagattgtttttggaaaaagtttcgaatcccaatttcttgtactggtcttcaaagataagtgtttgcgacatccttttgctttcctataaatgtacaaaaaagcatgatctaaaataatcatgctgtaaatttaatattaaaaagtttcattgaactttacctgtttttctattttgggacgccattctttttgattagacatagtcgcaaatatcttgtcctgaaaataaatctcataccagattgttttattaaatttaccaaggttttcaaaagctttttcagaatgtatgataagtttaaggatgaattcctcattggcatcacgatgattattaatgatctggcttagtaagataggagtgatatttatatctttagcaaattcatttcgttttgaataaatggtgtcaatatatgtttctaaaaatgcagtaaaatggttttcatgatcgtataaaggagctttaagatagctgtccatctttaattttaattgcaaaagtttggctcttataatttgttctttggaaggtttgtttgctctttccaaacgggcttttactatagctttatagtctttttttctttcttcaatgctggtatatcttgaatcgacaccatactcagcattttcgtttactttgtttttattagtgatcgtattcatattctttaattatatctaatatttcagggacttccaaacatagtgactgccctgcaatgtacattttatatttatctatatagtgttgatatatagctgttttaggctttagagaaacacaggcaaactctccaaattcctttacggcaatttttgcaacataagcaattaagtttcctgctattttgtcaaattttttattttttcctttattttctgccgaaacagtaagaagtctgatgtgaactcttaactcttccggaataacttcaaaagagattaatcctaaaatatgctttgtatttttaatgatgagtttacaaacactttgctctttcccttctttccaattaaagaaatacttttccttgtttaataaattgtagtctgcgcttcctaaaggcagaatctctatcggaaaaaatttctcctgtcgaaagctctacaatattaatgtaataaatatacgaaaaagtttccagattgtgcaaactttttgttccgtcttttatatcaatattaaataacgtgaactcgactctaaaatattgaattatatttagttgtccttgccatctatgcatttatccagttcgggaaatttaccgatggtttttccgggtaaaaacaataggcgcatatggcagagatcatatgggttaaagcattatcgggatttcggtgtctggaatgctccagatcaaagacggaagtaaaaatatcgttcacactctctattaaaggatttctatcaatagattttcgtcaaaaagcatatctttgtttttcatgaggtgttttagtatttgttcaattctaaaatattaattttagacattaagcacctcatgtttttctccgaattcacgnnnnnnnnnnnnnnnnnnnnnnnnnnnnnnnnnnnnnnnnnnnnnnnnnnnnnnnnnnnnnnnnnnnnnnnnnnnnnnnnnnnnnnnnnnnnnnnnnnnnttgctttcaaaaattattatcttcgtgatgaaggacaacgcaagtgttacaacgctatttaattgcgttgttgtgaattgctttcaaaaattattatcttcgtgatgaaggacaacaccaatataattttcccgacgaagcttttggttgtgaattgctttcaaaaattattatcttcgtgatgaaggacaacctcaaaaaataatctactggttttcagtagattatttttgtattcaggatttaaaattcagaacaattcgagctgttggaaggtcggtggcggttcttctttatttctggcaaaaaagatttcgatgtctccaaactgtttatcggtaatgcacataatggcaacctttccggctttcggaagcataaattttactcttttgatatgaacttctgcattttcgcggctcggacaatgacgcacatacatcgaaaactgaaataaagtaaatccgtcatcaatcaaagctttccgaaaacggtttgcatctttcatattcgctttcgtttcggtcgggaggtcatataatactaaaacccacataattcggtatgcattaaacctttcggcgttcatttttggtgactattgtttgtttattgtaataatcgcagcccgacctgagtggagctctttttgcagatttttatccttcgactccgctcaggataaactacaggcggataaagctgccataaaaaaattacatcaattccggataggaaattagtcgtttttctcctgtgtagcatttataaagcgatgaagcggttgtttttacagcaaccagcaacggtcttgttttgtcatcaatacgcacatctttggtcgcaatctggagaatatgcgctttaaattcttttgtcagttcttcggtatccggatgaattttcagccactgcatcacaagtagatcaacaaacggacgataaggttccattaaatcatcggcaaggcaatacggattgtatttatttttatggaaaatgccgagaacaggcaacagtccggtttctacaatggctcttgccacaatgcttctaagcacggcatatccaaaattaaaaaactgattgggtgaatctccaaaacgctgcctcaaaaagtccagactgatgaggtatttccagtagtgctgcgccgcaattccttccatattcgttatatcgccggattttacgtttctctgatattcaatcatcggttcgtagtaattccccagtttcatcaggacatttttctggttttcgatcttgcattccaccgtctgtttccaaagctgctttttcagcggttcactggcttccaactgatcttttacccgatcggaatgttcggtatgcccatacagcggaagcattattccgtgtggcaaatgatgcgcatcgcaactcaccactacgacattgtttcccatcattttctgaatcagatggtgcgaaatggtaatctgataatgatccagcatcaataaccccaaatcttccacaggaacactccccttttccgttttggtttccggacagaggattttcaattgctcgtctttgagcttaaggtaagcgggattgccgatgtagatggagcgggtgatcatactataaatgttttaatattctcctatttgaactatcttacctaaatgattaagccttacttttacaatagatctcaaattattagagctttgaattactttatatgacgtacctcttaacacagaatttacatctacacttgtttctaaatgatgtctaaaccaaaatccagaaagcaatgatccgaacttctgcactctaaaaagatttttagaaatcaaactcagatttttatcatcaaataaatcaacttctttcggatcaaaatcgcctgatggaaataaaaacatttcattctgtttcattgtaaataagaatttccaacctaactcagaattatattctttgtcaataattggtaaattctgatttactctttctacagcttcataaaaactcacaactttctcctgtagatttccattttcatcttcataaattgcaacgtgatgattatttcctgtactgacgaaatcaacggctatcttttgaccattttcgtctaaaatttcttttcctaaatgatcttttttataatgtaaagcttcggcattattaattcctgtaatagtaacggtctttattgaaattccttttgatttgttaatccagatcggattcttttccaaatctgaaaaggcttctttagagtttccgttaaattcttttaatctttcagttagaatatcgcgaactcctttatcaataactttttcaatatttttaaaatctttaaaattatccggattaacaacttttctgatggtataacctttttcataccaagctaaagatacggtttcaggtaattgctccgttttttcagcattaagaaatattggatttttagaaataatatttttcccagtgaatgcttttttagaatctccgccaaactcctgtaatctttttagcagagcatttttgtatttttcattttgaactttctgaatagtttcgagatcaaattttccagatattttttcttcttttgttttaagaaatttcgaacttccgtaaattgtttctttatgaagctgtcctctcggggttagttctgtttttgcaattatacttccctttttcttaattttattaatatttttggtaactactttatttttagctttatgagaaatcaaaacttcttccaattgttttttcgcttcactacggaaatttttaatcggtaatttgaatcttctttcttttgatccgtttttcttttctacaatttctgtaatgctattttcaatatttgtaattattttatgttctttatgagcttcattttttcttgcattcaaataattcagatattggatgtgactgtgggtggtaaaagcaaccgttaaagcatccattgcgtgatggcgatggtcatttctcttcgtccaatcaatgattctttctttttcctctcctttggaatttgtaattaattccgttaaacctaattttctgtacttttcgatattaagttctttcattgtgttgacaagattccagtcttcccgaagtttatcggtaattcttcccgaagtggaaaccacagaattagtaattccgaaaagaatttcttttgcttttttagcgatatattgtgtatttcttaaatctctttcaatgaatccctctcctatttcagaaccttttttttgtagcttttcatatttcgctttggttataatacttttatcataaagatcttttatgacattaagaaatttctctaatttttcctttccttcattctcaagatagtcgaaagccgtaaaatttccttttttaagattagcacttctcggaactaaaactttattggaaaaactgtcatcaaaaaatcgagattgaggaatgatgtggtcaatatcgtatttatctgtaaataaattttctctttcaatttttacatctgtatacagatctttaaagccgttatttgccagttccaagtataatttatagcgaataatatcatttcttgaaggactttttatgccaaattctctttgcaaaacttctgcatatttctgatgctgtatagtcgctttgttaatttcagaagtcatcgtagcgcgttcttccgcattaagtttgagttctcgcgccaattcaattcttacttcatctggttttccgtattctttgattatttcattgaccagattgatcatttgattcaaaatcttttcaacgactggatttcgtaaagaatttttaggaagaatatctaattgttctttcaaaatccggttctccaattgctctttggtcaaagaatttttagaatgattgtaacctgcataattacatgctacgctgtatttatgttctttaatgtaaggataaatctttcgcattgccttagaactcaaacttccataatcctgagaaaaactaatttcagctaatattttggaatgttcttttttgaaaccaaatttcctctccaataattcatacaatttttcgtttccggaaggagaatcatcgccttcataggaatataataaatgccatagctgataagaagcctgtttttcaaaattacttccttccaactccggattaaaatccagaatagatgtatcaattcctaattctgaaagcttttctctgacaaataattttatgacttctgccgaagcatttattttagaaactttaatttcgtcatcaatggttaatttaaattcttttggaaattctatcccttcactcgcaataatctttaaaaaagcagtatataaattttcattagtataatttccttcaatatctttgaaattagttttccattcttttcctgaatatccaacaagatctaaaacatcttttgcagaaagctttcctttgatattcacctcatcaaaaatagattgcttgaaatctaaatctactgggaatatttcctttgtatctaaattttgaaattgtaaattattcagaacctgccagattttaaattcctgaaacaaaggagatgattttggagcaacttttagcccaacggttttcttttttgtttttccattttctgtaatttcaatttccctgttttcaaactcacagatactgattaatcctttctgagatttgagtttcctttgatagaaaatgataatatcccgaatttcttcctttaattctttcgttaattctttataatgttttgattgagtttcccatatcttctcaaattcatctaagtaatcctgtctgtagaaaacctgatttttaagctttgtatgagggttttctttcaactgctgaaataaatactctccaactgtttgattatgaaaataaagctctttacttcgatcactaatcgcacctaaataaccgctagaattattcagattgctgttaatttcctgaaatacaacagccagactttcaaaatccaattgcttttttaccgcttcgcttctccaaaagtatttttcaactttcttctcctgcattgttccggtttgcttgattccaacgagagaaaatggctctttcagaattgcccaagttgcatttttatttttgccttgtaattctttataaaggtcatcggttaaaatttctgaataatattgtttctgaaaatcccatactttattaaattcagcctgtaaatctgaacgataaaaatctggcaactgttttttcccctgctgtaaaagttgatatgaatattctccaggtgttaaattttcttcatacaattttttggcaacagccattccgtctacaatctgtccttcatcttcatttttagctttgcggctgcttttataccctctttttttattgataagaagcaaaactctggcaaattctgaaagttctattttttcttttgctgctttcgctcttaattcctgagtctgaaatgttgaatttttgccaatttcggcaagtaagtcagattctttaagaatattatttttctttaaaacatcaataagattggctcttcttaacttaaatctctgaagattccttcttgcacttctggctaaagttcttcccgcattagttgtaattggttttcctttttcaaaatttaattgttcatcaacagttaacggatttacacgaacccctaatttgataattttactgttttctaaattttcagaatcctcctcaacataagcccagccaattgatgaaactcccaagtccagtccaagtatatttttaatcataagtatcagttttttgaagtaaataaaaataagaagaaaaaatttattaaaaatgaggttttccgtaaaccattcaaagaatttttcttttatatttgtatcaataattttgaaagcaattcacaataaggattattccgttgtgaaaacatttagcgcctcgactatcttcggggcttttttatgtctaaatttttcagtgaacaccattaaaattataaataaattagtgaactaaaacatttaaggcggggtaactcgccttcttctttttcaggagggaaatgcaaaatcccaaacataaaaaaagccgcctcaaaaaaggaggtcactgaaaaaccttgcatcttacgacagcctatttatttaggatgaaaaataagagcttattacaagatttaaaaatccgtaataagctttttattttattgggaagttgtttttttgatnnnnnnnnnnnnnnnnnnnnnnnnnnnnnnnnnnnnnnnnnnnnnnnnnnnnnnnnnnnnnnnnnnnnnnnnnnnnnnnnnnnnnnnnnnnnnnnnnnnnccaacaagaacatttctgtaagctacctaagagcgaaaaagaaaaacgatgcccaaagagtgcttgaactctacggaactgctaaccaaaaatactggtaacaatggaatgggataatcttcacgaactcctgcggtcgctttatgatgatatgatgccgcttgcaggcgatatggcagcagtagctaagggtttggcaggattgggagcattgttctatgtggcattaaaggtttggcaggctttaagccgtgccgaacctattgatatgttccctttgctgcgcccgttcgctttggggctatgtattatgttttttccgaccatcgttttgggaaccatcaatgcggtactgagcccggtagttgtaggaacccaccaaatactcgaagaccaggtgcttgacctgaacaagctgcaacagcagaaagaccaactggaatacgaggcaatggtcagaaatcctgaaactgcctatatggtatcagacgaagagtttgataaaaaactggacgaactgggttggtcgccgtcagacattggcacaatggcgggaatgtatatggacaggcaagcctacaagattgaaaaggcaataaaggactggtttcgcaatcttttggaaatactatttcaggctgcggctttggttattgataccatacgaacgttttttctgatagtgctgtccatactcggaccaatagcctttgctatttccgtgtgggacggctttcagtccacccttacgcaatggctcacgaggtacgtcagcgtttacctctggctgcccgtttcggacttgtttagttcaatgctcgcacgcatacaatccctcatactcgaaagggatatacagatgcttgccgaccctacctatatacctgatacaagcaatacggtgtacatcatttttatgattatcggcattatcggatacttcacaattccgacagtaacaggttgggtaatccaagccgggggcgcaggaaactttacccgcaatgtaaaccaaactgcaatgaaagccggaaacattgccggggcaggtgcaggttcaacagttggcaacatcggcggtaaactgatgaataaataaacaattaatcattctaaaaaatggaatttaaaacgctaagaaatatcgaaaacagctttaggcagatacgtttgtatgccattgtgtttgcggttctctgcattggcgtggtaggatatgccgtatggcgttcctaccgctttgcagaagaacaacgccaaaaaatctatgtactggataatggcaaatccctgatgcttgccttatcgcaggatgcgagcatcaaccgtcccgtagaagcaagggaacacgtcagacgttttcacgagcttttcttcacgcttgcgcctgataagaacgctattgaaagcaatatgagcagggcatttaaccttgcggacaaaagtgctttcgattattacaaggatttatcggaaaagggctattacagcaggattatttcgggtaacgtacagcagcgtgttgaggttgatagtgtcgtttgcaacttcgacaactatccttatgccgtgcgcacctatgccaaacagttcattatccggtcaagcaatgtaaccaggcgtaacctgattacctcctgctatctcgtcaactccgttcgttccgataacaacccgcagggcttcaatattgaaaaatttgcagtcgtggaaaacagggatatcgaagtcatcgaacgctaaaaacaatcttatggaagcattatcagatttaaacacgttcgcaaaaatccttactgacaaaggatataacggctatttccatacgcagggagcgtatgcgggaaaattgaaagacagcattaccgattacctcgaaagctgccaaaaaggtgcagacagtttacctaagcaagacttattgctgacgggctacctgcaatggtcgggagaagacaagccacgtgtagaatgcagtatgtgggtacaatacctgaacgggaaattttcgctcaacaaaatggaagtggcaaagaaagaccgtttcgggcagttgctcaaaaaatcggaactggcaaacctgtctgtaatatccgcacccaaagcagtggaagcggtagcgttggtcaatgatgagccaaagcaaaaggcaggaaatagccctaaacgtttcaagctataacattagaaatagtaaggctatgaaaaaattaagagcaaatatggataggtattttgataagctcgacgagcgttggcaggcattgccagtgcgtaagcagcaccaatatacgctgtacttttttgtgggttatctcttgctgacggcaggggttatcggcaaagtagtgtacgatacgggaaagcccaatgatactatcaatatcaggcatatcgagaaccctatccttaaaaagaatggaagtcctgcaatcccgcaggacacagtatcaacatttaaaaaataggatttatgaaagaaaatgagaacaaaaaatcggttgttcgggtaaccgagggaagcccgaaagaaaccgctgatgtgctgcaaaacggcacacagaataacaaggaaaagctcaaaaagcctttaatctttggcttaatggcgattgtattcgtgggttgtatgtacctcatatttaaaccgtccgaagataaaaaggcaatcgaaaacatcgggctgaacgatgctgtaccgcaggctaccggagcaggaatgcctgccgataaaggcaaggcgtatgagcaggaaatgcttgaacaaaaagagcaggaaaaacgcaatgccctggctacgctttctgactattggaatacggaagataagcaagagccaaccgatgagcagcttcctgaagatgaagaaagcactggcttaggcggtggtggcagaaattcaggaagaaacggcaatcctgcattaagcagctaccgcaatatgcaaagcacactgggttcattctatcaggataacaattcggaaacaatggaactccgcaggcaagtggacgaaatgaaagcgaagttggcggaaaaagacgtgccacctgtggccacggttgacgaccaactgaagctaatggagaaatcctacgaaatggcagcaaaatatcttccgcaaaatgccaacaacggaaatgctgcacctgctaacggcacagctacgggggctgcgggtgctaaccaaaaagagcattttgtatcgttcacgccaacaagaaaaaataccgtatcagctttataccgtgaaccgtctgacagtgcctttgcagccgattggagccaagctaaaaatcgtggcttctataccgcaggtgctactgaacaggtaatgcaacctaaaaacagtatcaaagcctgtgtacacgaagcacaaacggtagtgggcgaaatgggtgtaaggctgcgactgttggaagctgcccaaacgccacaacgtaccatcccgaaaggaactattgtaacagctaatgccaaatttcaaaacggcagattgcagctaaaagttacctcgatagaactggacggcaatatcatcccggtggatattacaacttatgatttggacgggcagcaaggtttgaacgtcccttattcgcccgaaatgaacgcccttaccgaaatggcgggtaatatgagccaaacaggtggaaccagtgtaatgctcacgcaaaatgccggacaacaggttgctgctgatttaagtcgtggcgtggtacagggcatttcgggctacttcgccaaaaaggtaagaaccccgaaggttacgctgaaagcggggtatcaggtctttttggtatctaaaaaataatgttgaactcaaataaatagaacaatgaaaaatcatttaaaaaccttttgggctattgccctgatactcggctttgccgtacaatcttttgcacaggacagtgtaactatcaaaactccgcttgcattgggcaagatagaaccgtaccgtatggaagttacctacgataaaacgtcgcacctgattttcccgaccgccattcgttatgtggatttgggcagcgaatacctgattgcagggaaagcggaagatgcggaaaacgtgctgcgtgtgaaagcatccgtaagggattttgaaccggaaaccaatttttctgtgattaccaacgacgggcgtttttacagctttaacgtgtattacagttcctacccggaagcaatgagctacgacctgctcacgatgcaaaaggcagtggacagaaccaatggtaacgatgtgctttttgaggaactgggtaataactcgccctcactggcaggcttgctattggaaaccatttacaaaaaagataagcgtattgtaaagcatatcggggctaagagttttggtattcagtttatcctgaaagggatttacatacacaacggaaaatactatttccatacggaattaaggaacaaaaccaatgtgcctttcgagattgatttcatcaattttaaagtagtggataagaaagttgccaaacgtaccgtagtccaggaacgaccgctaacaccgttgcgcacttacaagccattggacggtattgccggaaaatcgaccgaacaaaatgtgttccttttagaccagtttaccattgccgatgataaggtactgctgattgagattttcgagaagaatggcggcagacatcaaactcttcaggtggaaaattctgatttaatcaaagcccgtttgattgacgatatgcacctgaaattttagtaaccttttaaagcaataatatgaaaaagtatatctataccgtgatgctcgtcctgataggcattacggctgcacaggcacaaagaatgctgccaaagcagaaaggactggaaataagtgcgggtgtattatcagatgataaaatcggtaacgattattacatcagcgcagcaatgactgtaaacggtaaaaacggcaattatcagctttgggcgttagaatacacgcaccagtaccacgactacaaagacctccgcataccgcaggaaacctattccgcagagggcggttacagcttctttttgttgggcgatgcccgaaaaaatatcacgctgaattttgggataactggtgtggtcggttacgaaaccatcaaccggggcgaagcaatgttgtacgacggagcgaagatactgagcgaagataattttatttacggtgcaggtggtcgcctcacttttgaaacgtatctgtccgaccgttttgtactcgtgctgcaagggcgtacaaaagtcctttggggtacagacttacagcagttccgaccgtcggcaggtttgggattaaggtttaacttttaaaacgtaaaaacgatgatagcaatattcaataaattcagaacgggattactgccattatatgtattcctgacaatcctcacagcttcggttacgttggtatcttgcagcaaagatgatgaactcgaaatacagaatgattttcctttcgaggtcattgtaatgccagtgcctaaagacgttgccaacgggcagaccgtagaaatacgcattaccatacagcgtacagggaattacagcaacacgcagtatttcctccgctatttccagtttgacgggcaaggcactttgcggtattacgatgaaccgccgtatcagcccaatgacctgtaccaattgccaacggagcaattcaggctgtactatacatcaacttctgccgtatcgcaatcttttgatgtttggatttcagacagctttgggaatgaaaagcaaataagttttcagtttaacagtagtgattaagcaatattttatacattgcgacgtacactgaaaaacttattatttccataaacgatgaaagcggcttatctcaatggtaagtcgttttctatttatggcgtattggcttacttgcattttaggggttcatcaatatttcttaaatttatacttgcgaattaaaaatgtgaggatatggtttcatcattagttatagggataatatttttggttgcaggcttgggacttcgttactggattaacagaagaaaattttacaggcgcagccctatgggagcagagggcttttcctcttacgaaagttcagtcttgattaaatttatcgaaagggttggtaaatgggtagcttacgcactgattattttcgggctgttatcgctatgggtttactcccgtgagaaaaaggataagccaacggtaaataccgaacaacctgcccaacgcagataattacaatacagatttaaagcaaatcgaatagcccaaaaggttatccgatttttttgttttatagagatagtaacccgccaaacactgcctctcaaagccaaaccctgcaacattctccacccctgcattaagcctttataaattcgacttccacagcaaaattgagcaaacgatggaagttatcgcaatacaaaaatccgctttcgacggaatgaaaaatgaactaaaggcacttttggaactgaccgaaaatgccacacagaaatacacgcctatttttaaagaagagcaatggctcgataaccaggaagtgtgcctgatgatgaacattactaaacggactttgcagacctataaggacaaaggcttgctgccttattccaaactgaaccgcaagaattattataaacgctcggatgtacaggctttgctcgaagccggacagccgtacaatactgttgaaaatggatttattcacgaatgacaatgaggaaatcatcgcccataaggaaatgattgcgcagctaaaaaaccgtattgaaagcatattgaaaaactatcgccctgtaatgaacggggaaatatacctatcaggggaagatgtgtgcaagctgctccatatcagcaagcggactttacagcaataccgggatgacaatatactgccgtatatacagataggcggtaagattatttacaaggaaagcgatattctgactatactggagcagaactacaactcacagaaaacacattgactgtaaccttttttgtcatatatgctatcaaaaaggaatgagtttagtatctttgtttgtagaaaatatagaaaatacttaaagtgtttttgctttaagttccgcattagaaactggtaatttttaaaaccccggaacagataagtaagaacgctcacgttataggcgtgggcgctcgcttatttgggggtcaggcgtatcagtgccttaatgccagtaagtgtggttgcctgcgccttatttttttgcaggttccactaacttaataaacattaagattatggaaagcaaagacaacttttacccagattttgacctccctgcgtcgcaactatcagctttctctctctgcatagatgtctttattatatctctcataaatggggaaattgtacgtttcaaacctaaagaaatagcacactttaaagaatggctttgccgttttaatgttagggatattgccgttaatgatggcatacctcacgtgtataaaagggttaatttatctaaacccggattttttaaacttattaaaagaagaaaatgagcaaagaaccaacaattaagatagcatttatagatgaccacgacctgctaagaaagggcatttgtgattttctgacaggctacggatttgaagtattatttgaagcggaaaacggaaagtctgctatcgacaaaattgcgctctgtgcatatcttcctgacctctgcatcgttgatgtgagtatgcctgttatgaatggttttgaaaccacaaaaagattactggaaatgtaccctcaattaaagatactggcattcagtgtcaatgatgatgaaaaggacgttataaaaatgcttgaaaacggtgctaacggttacgtccttaaaggagccgaccctgacgaattaaaaaaggcggtggaagttatttataacggtgggcaatactttagtgcaggtgtttccgaaattgcacaggactattacaaaaattaattttattaaaggcggtctttttcctcaatggataaggcatcggcaatgtcgtttaacagcttttgctgctcttctgatttccaactatcactacctgcaaaagtatcatcgcaatctgccagtttttcgtatgcccgcttcagtagttcctggagctttaaaatatcgtcttccatcgctttgctgttggttgaacgtaaaattaataatattccaaatataacaaatgggataacgaatatcccacgcaataatgtcgcaatctctttgatgaaaatgtaaggaaaggggcttgtgtggcggcacattttgtcaatgggattgcaccgattgaatgcaaaaagactgcgccgaccatcgggaggatctgtctttttgccgcccgatttttcaggtcgggcgactgttattttagcttatggtttttaaatactcgtcgtaacgttccgttatatccttgcctttcctgaaagtgtcttttgtatagctgtaatgctcttcaaaaaactttacttctttggtggtaaggtctatggtatagcggtagtctgcatttgcccgcctttcatccattgtgcaatgctctttcagcatttcgagttcctgctcactgttatcaagggataacaagggcaaaaaaagcctttcaacgatatagccctgttcgggtgcgctgctgctgtctgcaacgcatatcagggatatgccgttgctcaatttgatatgaagatttgaacgtgtcattgtttaaaattttaaatagtggttactaaatagctaagtctaaaaggttatttgccatttttccatcttccgtaaaaaggtactcgtttgcttcaaagacttcctttaaacttttgtcgcttgtttcaaattcgtactgtctttccagtgatttgtataaatagctattcagccgattgaggcaaccccttaaccatttgtctaacttttctaattcatagtcgatattcggctgcaaggtgtccctgctcggtatgtaatgataatccgtccacgtttcaagccagtaacccctgtttggggtttctgtgctccaactgcattctataaacccttttttgattaatcgtattacccgttcatcgcaagggcaatcattaaagtacaattccagtgtcggggcgtattctttccacgcttccgatttgatgcctttgataaactttacttcgtctatggtagatttaaaggtgctgccgttgccctgcgaccaaaagccactaaagaaaatactgtctttgtctatcataatcccaatggttttacaaatggctgtaaagtcttcgtactcgccctcaaaccagtgagtgtcttctacgttaaaatgtctgtatctttcaaatgcctgcccctgtgcttcttggcttaattcgtctatgctgaatagatttaatgatatacttttcataactatgctattaacttggttagtaaaaattcttctgtccaaaattcctcgctcgtgtgcttgccgtatgctgtatagtagcctgtaccgtttgcccgcaatacaagcctgtaacaatccagtcggttttcaggtacggtaaacgtttcctgctcttgctcgtcaagctctacaaatacccattctttgccgttaagcagttcttcaatgttcgggttatcatcttcgcctgtcctgtaaaaatctactgccgtatcatagtagttcatcgaacagaaataatgattgccctctaacggcttaacgagtgcaagccgttttacctgttcttttttccattcttcggataggtggataattgcaaactcacaattatcccactcgctgttggtgttggctttaaccaaaatatgtgctgttgttttatctgatagtttcattgtcttaaattttaatgctgtttaactgattttcgattttacgctctaacaaggtttcgagtatttcccattcgctgtcatactccttaccctcaaaatggtagatgtcggtttcctcgtctaattcatagctttcaaaatcctgactatctaagcaggtttccgttagtgtaccgtcctcaaatgttgccttgccatatactaagcatcccaattcctcatactcgtgtgtaaaggcaactttaaaatgttctgctatctgcttaacgacctccgtattaggcgaccattttgtttcatactggaatacgcccgtactttcattgtcctggctgatattgtagaaataatctccgtgcgtgtcctgtacgaaatcgggcaattgcccgcaatcttctttctgctctttgtcagccatagatttgaatagctgtgttatctgttcgattgcttcgtctgttccctcgaaaacaaccgtattgttgcaccagttagccataattatttatcgtttaaggttatttgtaaaaatttgtcgctcccgaatagcaggtgtatagcctgttttaattgtgggttgcattgctcttcgtctgcgtattcaacaaggcagtggatagcgaatattgagtgatgtccgtcgaaaaaatggtcagtaaaccagtgcggacgtttccaaagcggttcatttttgtttataccgttttttgcattctgcacaagcctgtaccaaaattcagcggtaaaaaatcctttttgataccatccctcacggaaggcagtttcattttcaaggaagtacccgcattgtttttctattgcgttttgcaggttctccagttcttcgggaaacagtttgcacagtaagcccgccttgtccagattatccattttatgtaatgctttcatatcttttgtttttagtaggcgaccacctttgcaggcagtcgcctttgatgatttaattgaagttgaaaatctctgctcctgaataggcaaagtcggtacacagttcaaaggctttttgtgtctttagctgtgctgtaccgcccattacaatagattgtagttttgcttcgccatccctgtaattgcgtacattctgaaaataacccgtaacagcattgtaagccccgaacaatgtgcctttggtggtttccatttgttgggtgtcgcttatcatagcgtattcaaaggcatcatctacggtgtttttgaacacggtggaaacttcatcttcagcaccttttttgagtaggttaagcgtttccttgttcgggcaaagtgccaactggattagctttcttacttcacggtctgttacccttactttagcccagtcgttaaaaatgttctctaactggttgcttagggtgttggcaagccccataaccttgtgggcgttttcaaggcgttgttttgcccctgatgtgtgtttgatacgcactacattggtcatactccgcaatgaagcgttaagggtgttttggcatacgatacggataggggtaaacgctgcggtaatacttccgctaccgtcgtggcttgttgtcaagaaaatgtacttttctgtaacgtcgtcgccgttacctactcggatatagtcgggcagcttggcagtgataaaaatgcgttccccgttgcccaatgctcctgcggtttcgtacagtattccctcgcctccgccgacaatagcatcaaagaagttaaacgcctcacggttttgtacgatatggtagtctttacctactacgcccagtgggatattggtatcggtgcgaagcgtggcgaaactgttaggtactaaaatgtcgttagcttcaatcagctctccgctatcgccgatgctcattgttctgccctgtgtaaacagtggggacttgataacctcataatctaaacctgcgtgtactattgcttcctcgcttgttgggtactgctctacgatttgccccaaaccgtgccacgctttttgctgaacgctaaagaatgaatgacgtcctgtttgctcgttgaaattgatgttgtgtgccataatgctaaaattttgatgtttgaaaaaaatgtttaaatactcactcgcttttctcgtttcccgcttccgttgtggtctgctccgcttcgcttcgcataattttttccaaaagaaaaaccggaaaaaagaaagcagataatccaagcgggcaacagcgaaaaccaagaaaaaaatgatttaatgggggttcctttagggggaaaccgttcattcactttttttattggtgggcgtgtggggtggctgcccgctataacttagctgcctttttaccggttgattgtggaaatattctgttctaatttttatggcattattgggcaggctatgatagcctgtaacagaaagtggagtaaaggaaaagtaagtgcataaaaaaagcagaaccgttaagttctgctcattgtgattaaaaatgaaagctaattatatagccgccaaaaatgcttcttccattgccctgaattttggcgtaaccaaatccatatccttactgattttttggcttgtgattttagcataaatctgtgtggtcgatatatttttatgccccatcattttgctaaggctttcaagcggtacgccctcggtcaaaaacatagtcccgaaagtgtgccttgccgtatgaaaagttactttttgttccgtaataatttcggctttttcaattagtttgcctatgtgtgtattgcaagtcgcattggtcggaataggaaatataaattcattccttgtagtaccctgatatttctcaatgatacgtttggggatttccaataaccgaacattggaagcaatatctgatttctttcttctgctgataatccattgatgaccgtcaaagaaagattgaatattgttccttgtcagttttttaatatcagcgtaagcaagtccggtaaagcaactgaaaataaaaaggtcttttacaagttcgtaacgtgggtgtggtggtacacacatcatcaacttttctacatcctctttcagaatataaccccggtcggtttcttccatattgatttcgtaatcctgaaaaggattatcacgtatcaaaccttttttaatagccaattctgcaagggctaatacaggcatcgtataaacccaaaccgtattatgcgaagactgtaaatcgtaccggagataaaaatcaaactcacgaataaagtcggaagtcaattcccgaaaagccatatcatcacgatgatagcgttcctttataaatgtggtaagatgattataaactgtgatatacttgttgtaggtgctttgtgagcgttcttccttttcaaccaattttttaaaatcctcattttggtcgttaaagacttttaggattgcatcatccattactcctacacccaaaaacgatagctttactttttgggcggtggcaaaaccctcgtgtttcagcatatcttcgtaaatcttgtcgatacgtccacgaatgttatccagttttttattaatgctcaatgcctgggcactcttgccctcaactcttccgtactttaaatcccaattattggggtttatttctaactttgttccgaaagttttaggcgttccgtcaatggtaatacgtgccataattggtgcattaccgttctttttcagttcgttctttttcaaatagaaaagcagtttgaacgtcgatttttttgtctgctccataactcaaatgtttaacgtttaaaattaaattacattgagttacaaggaaacgtagaaaggggtgcaaaagactgaaatataatcggttaagctatgctgttacctttgttaatcggtaacgaattagtaacctaaccttgtcattttaagcccaaaacttatcagacaccgacttccgaacttagactacaacttttataaagccttgtatagcaacggttttaaccattttgcttatttttgctttttactaatcttttttactaaaaaatcgcctctgctgatatcaatatcatcttcaacatgcagaacagcgggctgattggcaaaaacaaattccacttctttcccccctgtttctatttttgaaattttggtctgaatattctgaggaagcaccgtaatttcgtcaccttttttgtaaattcccgaaagaacttctcctgcgtatcctctgtaatcatgcagatcctccgtttgcggacgaatgacatactgaacctgaaatctcggactctgaaagttttgatctgaattgatttcaaccgtttcgaggaaatccaacagcgtagaaccttcataccaagtcatattttctgatctttcaacaatattgtcgccatgaaatgccgaaatcgggaaataatttacattttttaatcctagtttttctgcaaccgattcatactgaacttttatatccttaaaaacttcttcagaatactcaacgagatccattttattgatggcgaccaccacatttttcatcttcaataaagacgcaataatggagtgtcttcttgtctgttcaatcacgccctgtctcgcatcaatcagaataacaatcagttgcgaattggaagctcccgtaatcatatttcttgtatactgaatatgtcccggtgcatccgcaataataaattttcttttcggcgtcgaaaaataacggtacgcaacatcaatggtaatcccctgctctctttctgctcttaaaccatccgttaaaatagcaaggtctactccgttttcgtttttattttttgactgtttttcgagtgcttcaagctgatcgatcaatatatttttactgtcgtacagaagtcttccgatcagggtacttttcccgtcgtctacgctacctgcagtgataaatcttaatatgtccacgtttgttttattaattatgagtaattgagtgaggttgagagtgaggttaaggtttaggctaagattaagattaaaggcttactacaaaaacttccatcttccaacatccagcctccaacttctagcttccatcttctagcttctagctcccatcttcctgcctccaacttccatcctaaaaataacctcctttcttcctgtcttccatcgcagcttccgtcactttatcgtcgattcgggtttcgccgcgctcggaaattctggatgcggtgatttcattcacaacctcatccaaagtttcggcagcactttctactgcggcggtacaggtcatgtctccaacggttctgtaacgtacttttttactgacaatcgtatcattttcatcaatctgaataaaatctgatacggcaattaactgtccgtcatattcaatcacctcacgttcatgtgcgaagtaaatggatggcaactggatattttctttttgaatataattccagacatcaagctccgtccagttcgaaatcgggaaaactcttacattttcacctttgttgattcttccgttgtagatgttccacaattcgggacgctgcagcttcggatcccattgtccgaattcatcacgcacagaaaaaaaacgttctttggctctggctttttcctcatctcttctcgctccgccaatgcatgcatcgaatccgaattcttcaatcgtgtctaataaagtgtgggtttgcagccagtttctggaagcaaattttcctttcggttcggttaaatttttagctttaatggtatcttccacttttcttacaatcagttccgcgccgatattttctgctaaataatctctgaactgcagtgcttcaggaaaattatgtcctgtatcgatatgaaccaacggagaaggtattttcatcggagcaaaagctttttttgccagatgaaccaaagtgatagaatcttttccgccactgaaaagcagcgcaggtttttcaaactgagcggcaatttccctcataatgtagatactttctgcttccaactgttccagatagtctaacgtatgtgtcgtcattttttatttttttgaattaatgagaatgcagaccgcattctttctgtgaactttcccaccaccatcgtccggcacgcggattttctccttcttcgattgctcttgtacagggttgacaacctacactgatgaatccttttttgtgtaaagacaattcctgaactttattttctttcagataatctaaaacattctggtaattccagtgaattaaggggttgtatttgaatagtttccggtcttcgtcccattctataaccggcatattttctctgttttcagactgttcggaacgtaatcctgtaatccagacttttgcattttccaacgcgcggtttaaaggtttaaccttacggataaaacagcattcttttctgttttctatggaataataaaatgcgttgattcctttttcattcacatatttttctacgtctgaactttccggaaaatagacttcggtttttgttttatatcgggaattattttgggaaagcaactcgtaatgctcgtaaaaaagtcttcctgtatcaagcgtgaacacttttaccggcagatgatttttgaaaatcatatctgtaattacctgatcttcctgaccgagtgaggtggaaaaaacaaccccttcagaaatttttgaagaaataaatttcagtccctcttctgcggaaagctgcttgagttgttctgcatcttcttttgaaatcatattctgttcatttgaagtaatgcaaatatcagataaaataattatcctaccaaaaaagtagactaattatttaaaaaaaaggatctgattaatccaccaaatccattaatgtcctcttttccagaatattcagcgaagcatcacgaacttcaatcagaacgtcgtgcagaccgcaatgatcttcactgcagtcgtcgcatttttcgtaaaaatttaaacttacacaaggaagcagtgcgatgggtccgttcacaagacgaataattttcgccagctttacattttccggattttctttgaaaaaatagcctcctccttttccttttttgctatcgagaatgtccgcttttttaagctcaagcaggatattttccaaaaactttaaaggaattttcttgtgttcggcaatttcggaaataagaatcggtccgtcatttctcttttctacaagatatgacagtgccttgaaagcgtattgagattttttagacagcattactacaaaaataagaaaattgtttgatatgtataataaggagatcggaagttagaagatggaggctggaagttttcaggaaccgcataacttccctcttctcgcttccttcttccgtccaaaatccctaaatttgcctcatgttcagtaaacaggaagcacagcagttaaagaaagagttttggacggctttcggaaagtcttttccaagaaaatggattttgtacgataccaaaatcaaggatatgtcgtttaaattttatgcggataagaaaaaagcggaagtttctctggatatcgaaatgaaggatgaagttttcagagatgcgtactacaataaaatctggtcactggaagatattctgaaggattttatctgcgattttcacaaggaagaattttatacgctggaaaacggaaaagttatcagccggatctgggttgaaaagcacggcatttctgttttcaataaaaatacatggcgggaagcctttgaattttttgttgaaaaaatggatggcttcgagcggttttattatgaatatgaggattttataaaagatgtttagtaaatagtttctaaaggatacaaaaatatatcatgaaaataagatattgctggaggtgcagaatggatgttcccatgcttgatgaagaagaggggaaaattgcttcgaaattattaactgaaggatttcaggaagttaaaacagccagaaaaacgcctttaaacgaaaatttcaaaaaactgctggattattacaataatttaaccggttttgaagaaacaaatcctaatgccatcatgcatcatttcatcgatatgtatggtcctgattgtgaaaactgcggaaaaccttaccggacggaaacggctacattctgcccgaaatgcggtaacaaaagaaaaatttaaggacttttcttaatttggattttttttaaacgcaaagattatttttttaccaatacaatcttgagaaggcaaagacaaatgaaatttgctgcacaaagcatcaaaataggtcttatcaaattaagattagcttatttagattctgaaatgcggtcacaaaaggaaaatttaaagacttttcttaatttgatttttttaacgcaaagattatttttatcagtataattttgagaaggcaaaggcaaatgaaatttgcttcgcgaagcttgaaagtagatcttatttaatttaaaattagctatttagattctgaaatgcgaaaacattatagaaagagaatagctatattctgtcctaaatgtggtaacaaaagaaaaatttaatgacttttttcaatttgattttttcaacgcaaagattatttttatcactataattttgagaaggcaaaggcaaatgaaatctgcctcgcgaagcttgaaaatagatcttatttaatttaaaattagctatttagattctgaaatgcgaaaannnnnnnnnnnnnnnnnnnnnnnnnnnnnnnnnnnnnnnnnnnnnnnnnnnnnnnnnnnnnnnnnnnnnnnnnnnnnnnnnnnnnnnnnnnnnnnnnnnnaggcaaatgaaatttgactcgcgaagcttgaaaacagatctcattaatttaaaattagcaatttagattctgaaatgcggtaacaaaagaaaaatttaaagacttttcttaatttaattttttcaacgcaaagattatttttatcagtataattttgagaaggcaaaggcaaatgaaatttgctgttcgaagcttgaaaacagatttcaagtttaattttgtgtcaagaagatgaatcgtgaatttttaattcaaatcaggatcggaagccgcttaaatatttttaaacttgtgattaaactaatttcagaattaaccgcaaaagatgcaaaagataatgataaagcgaatttcaagaataatcaaagcgcgctcaaaagaataaaaatcaaagatttttaaaaactgttgtgatcttcttatttataatcacaactttaaataaacgtttagttcatcttttgcggcttttgcggttaaataaaaagtttaaacagatttttgtataaaattcaaccttatcttatatttttctgtattttggtcaaaataaaaataacagaataaattttcagcaaaatataaactgaaaaaataaaaactaataattaaaacaaaatgtcagaaaataaaatatttttcgcagacgcagcagatcctgaaatgtctaaagcttataagaaagcgcaggaaacttttaaatatttctggagagagcaatcttgggaatacagaagaattattccggcactgagtatttcatgcgtgaaagtggctttttctcaggaagatccttcttcagactcacctattgtagaacatatgtggatcaatgacatcaatttcgatggcgatcttatcaaaggctacctcatcaaccaaccgaataaacttacgaatgttgaagtcggagattatgtggaaattcctgtaaacgaaatcagcgactggctttttgcaatgccacaacgtgcaaaaaaaacgaaaggactttcaaaactgttttcatcttcttcggagtctcttcctccgaaagcttatggcggatttacgatccagaaaatgcgttcggatatgtctccggcggaaagaaaagcacacgacaatgcgtggcaaatggatttcggagattttaatgatattgaaatcgtttatgaacagaaagagcatcctgaaaatcttgtagagcatccgatgagcagaaatatgaaggaagagctggtaaaattcgtcagcgaaaatccggatgagattacaggtcaggatagtaacggctattctatgcttcacgcggaaacgattgccggaaatctaagttctgtggaagtgattcttgcagcaggaggcgataaaaatttaaagacaaaatcaggaaaaacagctttggactttgcccgacaactgaattgggaacatattattcctgttttggaagattgattttatcttaattattatacggaaagagagactgaaaagtttctcttttttgtttttatatcattcacgatctgaatacattctttcccgattcggctacatttcccactgcacaactttccatctttgtaccatcaattaaaaacaataaaacatttaaaaatggaaacaaaaaaagtatggttcgtaacgggagcttcaaaaggtttaggatttgaactggttaaaaaattattatccgaaggatttcaggttgctgcgacaagccgcactgtaaattctttaatttctgctttcggagaggcttcggaaaactttctgcccttaagtgtaaatattacggacaataatgatgtaaaatctgccattgcaaaaaccacagagcattttggacagattaacgttgtggttaataatgcaggatacggacagatcggaacgctggaagaacttacggatgaggaagcaagggaaaattatgcggtgaatgttttcggaactttaaacgtcatcagaaatgcaatgccttatcttcgtgagcagaaatcgggaaatattttcaatatttcgtccatcggaggtttttcgggaaattttccgggttggggaatttactgctctactaaatttgcagtagcaggatttacagaagctttggctgaagaagcgaaagatttcggaattcatgcaacagtagtttatccgggatatttccgtacagattttttggctaaagattcggtaaaaactccggcaaatcctattcaggcttatgaagcggcaagaagttcggaacaggcacatcttgacgaaatcaacggaaatcagccgaatgatcctgtaaaagcagcagatgttctgattcagctgagcaaagaggaaaatccgccggttcatttccttttaggcgtaggaaccatggagtttcttaacaataaagtagatgcgattaccggggatgcaaggaaatgggaggttttagcaaattctacagcaatttagaattaatttacttcttttgtcttgaaacaaaagaaccaaaaattcaagacttagatcctgaatgctaaaaattaaaacgtaatcctaaaattcccaaaactcgcgcgaatcaaaatttgttcttcggttatggattatactcgcgctcagacaatggaaattttttaacggattacgttttaattttcttaacgcttcaggctcttatgtcgcaataaaataacatgtatttcagaaaaaatcattaaaaacaattaacttcgttattatgaaagagaccttccgttttcattcgatctccgattttcatgctttctgtaatctgccgagtccggatcatccgctgatcagcttgattgattacagcaaggttcgctatcccgtaaatgatacggaactgaaatggacccagaatttttattcggtggggctgaaaaggaatgtaaacgcgaagtttaattatgggcagcaggaatatgattttgattcaggcgtgctgtgttttgtttcgccgatgcagtttctaagaattgagatgaagccagatgttgagtttgaaccgaccggatatcttttgctgattcatcctgattttctttggggacctcgctcatcaaaaaaatgaaatcctacgaatttttcagttatcagatcaatgaagcgctttttctatcggataaggaagaaaaaattattgtggatctgtttaaaaatattgaaaaggagtatcagacaaatattgataaattcacgcaggagcttattgttgcgcaactggaattatttttaatctattctgaacgtttttacgaaagacagtttttcaccagaaaaaaatcgagtcacgaattgctggataaatttgaggaagttctttcgcagtatttcaacagcggaaatcttctcgaaaatggtattccttctgtgaaaaccattgctgaacaactgaatatttcacccaattatctgggaagtttattacgtattcatacgcagcagaacacgcagcaacacatacagaataagctgatcgctcttgccaaagaacgcctgagtacgacgaatttatcggtaagtgaaattgcgtatgaactgggttttgagcatccgcagtcgttcagtaagttatttaagcagaagacgaatcagtctccgggggagtttaggagggcgtttaattaggatacaaagattatttaacaaataattttctttaggcatgtataaagaaaaatagttactaaagagacattaaattcctttttgataaattttattatttttttatatttgaattgactaataacttaaaatatgagaattaatattattgttgaagaggaaatcaaagtagataatttaaaattaaaagaaattttaaaccaaaattcatcttttttagaatttgaagttaaaataagtagtctgaagatcactgatgaattaataatttacccaaaaactcatttagatttatatgaacaattatcagaatttgaaagagattcacatttaaattttttttttacatatcgtccttatgataataattttttctttgagagcttagaaaatttagtacctgtttctctatttggatgggatttcttaacaaatcttccgattgaaaatggtatacttttcttttcaataaattatttagttaggcaattaaaaaatgatgattttagacatgaagaaacaactggttgcatgtatgattttttatgggataaaaaaggtgttgatgatggaatgcgtaaagcttcgttttgtaaaaattgtttgacagaatttgagcaacaaactctatcccaaaatgaagagagacttttaaatgatttaaaaactttaatggatttattagcaagttcttcgaaatggaatcaaagtattcttcagaaagctaaggaaaaaactgaaaaatcaagtcttaaaagaaaaactctcaataaaggtgaaataaatataataattgcttctcctagtgatttagcagaagaaagagagttattacttgataaacttgaaagaaagtttagattagataagcatgaagatttatgcaaacatagacttaaagttcatggatgggaggatttaccatctcaaagtggctacgcacaagatgttattaatgaaaatgtgctttctaaaatggatattgttttagcaatattcaagcataaactcggttctcctacaattgatctacaaacgggaaaagaaagattccaatccggcactgcagaagaaattctttatgctttggataataaaagtaataagggacctttaggtatggtatattttttttctacaccacctgcaccatcattagaatctgaaaactttgagaagatcaaatcagaatgggacagattaaaatcttttaaaaattctattcagaataaagtcatttataagccattcacaagtaaagaagaattaattaatgaagtcagtatagatattatgaaaaatattactgaattatacgaaaattaatatttaaggtaataaaaaagagaagcaaaaacttctctttttctatatcatttatccaaacttcttctttctcagccagaagaacaaacctcccaaaacaccgataatcaccaaaggaagcagcaaattaaaccattgccagttgtttttctcttccgtaattctctgtcggtcaagaagcctttcttcgatatttcggtttctgagatccatgaggttgctgtcgtccagaagataatctaatgcatttctcaggaactgttcgttaccaaactgttcgttggtaagcaaatctacgcctaaaggaagcggttctcctttcagaactttatttcttcctacgtctccgtcggcgatcacgatcattttattttcagggctcgaacttttgaaatccgggtaggattttctttcgattcttgaagcatacgcagaattgaatttccctttcagagacactgcataaatcttcggcgtgcttggtttttccatctgtccgagactgtcgacgctagaaatttctttcagatccacataattcggaacctgctttaataaagttctttcactggattcaaaaagaacgttcgttttgatattttttcttccgcccagtgtatcgatagaagtcgggaattcaaactttacaggattgatattttttgtaatcggattgttgctttctgcgattcccaaaggaaaatacggccatggaagactggtgtactgcggatttccactcacttctcccgttactaatctcaacagcgcaaatttcttcacatcttttaccaaagccggattgatcctgattccataattgaagaaaaagtcggtcatattgatgtctacaggaaaaggcattactttttgagacctcatcagtgtatccatttccgcatttacggcatcaatcatccacaaggtttttccgccgttcatgatgtattggtcaagaattactttttcaccgtctgtaaaagcttttcttggttttgcgataaccaaagcattcatttgttttaagatcggaatatctgcgatggtaagttcggtctgatttttaggaataataggacctgcatcataactttccgttgccagttgcataaatccctgaaattctcttggattcagctcatcctgatttaccagaatcccaattttctttcttttgtgcgccgcaatatttttaatgtttgaaaccagattgtattctaaattttcaatagatttcgtgagctgctgatcggcatcaattcctgtctgctgaaccaccaaaggaatggaaactccccttttgtcgtatttaactactgcataaggaaagagcatgatctgagaaactttgccgtctttgatatccggaagcatggaaggctgcattcccatcgccatcagagtatctttagacattttggttttaataggatcaatgaatttaaaatcgatcttcggattaatttttctgaactcttccagcataaatttcgtttcgctctgaagctgtttgaaacttgccggaaagtctccttccagataaacatcgactaccaaaggtttatttaccgattccagaaccttaacggtattatcggaaagcgtatatcttttttctttggttaaatccaatcttattcctgaaatagcaagaataataaccaatggtaacaccacgaaaagtaaaattcctaacggagatttgaaccgtatcttcttcatcattctacttctttttattaatgaaatgattggacaaaactaatgtaacacctatgattaaagcaaaatatgccacatccttaaaatcaataagacctcttgtaaagcctaagaaatgttggtaaaagcctacattctgtaaaataaaatctgcgcctcccaacaatttgtaacttgccagttgctcgatcccgaaatacatgatgaaacacatgaaaacgcccaacagataagccataatctgattttgggaaagcgaagacgctaaaattcccactcctgaaaatgctgcaattaaaataattaagccgatgtagcttccgaacgtcattcccaaatctacatttccggcaggaacgcccaaaacatacactgtataaaggtaaattaacgatggaatcaggcataaaattccaacgatccaaaccgaaagaaacttaccgaataccagatctgaaactttcagcggttgagaaaacagccagtttaaggttccggtctgctgctcttccgcaaaagtcttcatggaaagtgcggggataataaacatcagtaaccaaggaaccagaacgaaataactttgcagtgaagccattccgatctcaaaaatgttggagtcgttgtcgaaaaaaaacagaaacagcgtcgcgatcagactgaaagccgcgatgattatccacgcgctccagtttccgaagtagctccaaagttctttttttaaaattgcaatcatagttttattgtcaaatgttgattgtttttagttgattgttgattgtttttagctgactttttttgatgtaaaaatctattcagcaactataaacacacaaccatcaaccgaatcattattttttcttattcttatttaccagcttcaccgtcatcatgattaaaaataccagaacgaaaaatccggcgattaattgccaccagtattcaataacctgagcttttaaaatcacggtaaaaacgacaaggaacaaaatgaaagtagcgatttcatttgcctgtctcagttttatattggcggtttcaagtgtacttccattgagttctttcagttttaaaacttttttccagcaccagtaatgatagaccgccaaaccgatcaggaaggttagttttaaatgaaaccatggcattttcatcaatcctgaattcaggaaaatcatcgtcagtccgcaaaccgtcatgattactccggcaggaacagtgatgatgttccagagccttcgggccataaacgtatattgttctctgaggattttcttcttttcttccgcaaattcatcggtatctttatagtatacaaaaattcttacgagataaaaaattcccgcaaaatagcttaccatgaagataatatgaagcgcttttattatggtgtaaagcattgatatttttttattttatatgaatgatttcacaatctctgtcaaaattctttaaataactgaaaaataattcttttcctctttttgaaccactaaaattcgtgtagattatcattgccattgcgattaaatatagaacagagaaataataatctccgtagaagtctttaatgaatgtaaatatcagaaaacctataccaaatgaaagtaataataactgataaaattcaaaaccaattaacagttccagactgtatttctgatccttatcaagaataaagtttcctttaaaagtttggaaatctttttccattaatcttactttaaatccattttccgttgtttttcctttaaaacttttaccataaaaatcaggaaacctccaaatatactttctttaatatttcctaaaacttcttcttttggtttagaaaattcaactctatatttagattccaaaaacatttagataaaaaattatgcgcaaatataatgattttgacatttaagtttaagtaaaatgtactgtaaaattattataacgaaatactttaaaaatgattatttcatgaatgaaatactgtctacttttttaccatcttcgtacttctttatgaactggagatttcctttttcattgtaaaatttccagtctccgaagtaataccagtggcgttcatttttagagacatccattttagactgtccactttgcatcaggtttccgttctgatggtatattttggtctttgtaatgttcttttttattttatctttctggaaaagctgattattcaatgtggttttccagatcccgactttttcaccgttcttatattttccgacagcaatcagcgttccttcatccgaagaatattcttccttccatttgccgtgtcgtttacttatattcttttcgtctttgatgtactgattcatcttggtgttgcaggaagccaataataaaacaatcagtaaaatgagggatattttttgcataaaaaaacagaatttccgtaaatatagaaattctgtttttattctacaattgtagaggtgttttatttttaagaaatttattctaatttattactgcttcaaaagctgattttttaggaactcaacctgttctttcagtaatgcaatctgctcatcttttgcttgaagcaatttgtctgaaatttctttattttcttgatgcaaagtttctacatacccgatagaaccactttcattcgtctgattaaaaattttctttccaatatctgaaaaaaactcttttggattcgtctccagaatacccattatttcttcaaaatacttagcccaagaatacgtttcaccagattctaacctttgataagcagatctggtaatgttcagtttatcagccatatcctgatgattatagcctttagaaattcttattttttttatcttctctgttatttcctgattcataaaatgtgtggtttgtaacaaaattagtgtttttctattcaaaaaaagagcatttatgcataatcaactgaaagtcaattaaatattttttcacaaaaaacccgaaatatgattttactatttgaaaaaatcatttcatatttacatcagaaaaacacaagtgcacaaatgttttctaaaacaaaattattaactttaaatttagaaatcatgaaacaaaaaatgattatcggagcattggcattagcatctgtatttgcttttgcgcaaaacacaggagatagttcttcatctgaaacggacagaagaccattttggggaacaggagatttgattagctacagctgtacaagaggacaacaacaagcagatggtacttttcaatgtgattgtgtaggaacttatgaataccatgtgttttggataggtgtaggaactgtagaacatgaattccatgaaacatcagcaaaccatttttgctaaaataaaagcaatgacagagaaattatttttctctgttatgttttttatccttttttcaggaaaggcacagattattcttagaaattctgactataaaaaatttgattctgttacgatatcaagagatgggaaaaatacatcgttaaaatcccgttctctcaaatcatttacatttgaaaataacgataagattttatatgacggtaaacttcttgacttttattctaatgcagactctctgattttctttgataacacaaaaactattgaagaagtaagggttaattatgaaaacacctccgctaaaaaagaaaaagcactaaagagtacgaaaaaaaatgcttatgcggtaattttcccgaataacgagattgcaacatttgtacaaattaatacaaagaaaaaaacttatattaagtctttttagtatttttcctgtagctgatccgaatttaagaccccataatgataatattactataaaagtaaaacttttaggtaacaaaaatggattgccagacaataatgaagaactgatagctttcgaaagtaaaatatcagatcttaaaataaagaaaaaagataaagttgttcggtgggaatttgttttgcccaagacaataaaatatcctaaagaaggtttttttgtggtattttttcaaaaatccttggaagacagtacttttttccaaataaataaagacagtgatctgctggaatattatccgaatgaaggctggaaaagtcttaatcttaatggatattattatgaattaaaaattttacaataacacaaaaatgaaaaaaataatcgctttgtttttattttatttagtttcctgcaataaaacttctgaaaataagaacataatcccggatcttcactttacaaaagtttggaagactccaacaagtgaacttacgaagatagaacttccttcgaatatagatttagacacaatagaaggaaatcataagacaatagattttacaattaaaaatacagggaacaaaatcctaaaatcattatttataaaacctccatgctcaagcatacaaatgccgaagtacgacagtgttttacagcctaaaaaggaacaaaaaatttctgtaaatatgtctattaatgaaattggaaatttttatttacctataacggtttatggtacattttacccttttaaaagagttttctatgtagaaggatatagaaaaagctaaaatttaagttggcaaaaactgaaatttgtttttgccaactgtatttttcagtattatgcctacttttaagaaattacgcctaattcttttccaactttttcaaacgcagcaattgccttatcaagatgttctctcgtatgtgccgctgaaagctgaactctgattctcgcttttcctttcggaaccacaggatagaagaatccgattacataaattccttcgtccattaacttttcagccattttctgagccaaaggcgcatcataaagcattaccggaacaatggcagcatcaccatccggaatatcaaaacctttagatttcatttccgctctgaaatattctgcattttccattactttatcgcgaagagaagtatcttcagaaatcatgtccaaaaccttcaaagctgctcccacgattcccggagccaatgaatttgaaaacaaatacggtcttgaacgctgtctcagcatatcaatgatttcttttttaccggaagtaaatccgcctaaagcaccgcccaaagcttttccaagcgtggaagtaatgatgtctactctacccatcacttcgttggcttcgtgcgttccgcgacctgtttttccgatgaaacctgttgcatgagaatcatctaccattaccaaagcatcgtatttatcggcaagatcacaaactcctttcagatctgcaacaattccgtccattgagaaaacgccatctgtaacaatgattttaaaatggtgatttttttcggaagctgcaattaactgaccttccagatcttccatattgttgtttttgtaacggtatctcgctgctttacacagacgaacaccatcgataatggaagcgtggttcagttcatctgaaataatcgcgtcctcttccgtaaataaaggttcaaaaactcctccgttcgcatcaaaacaggcagcatacaaaatggtatcttcaagacctaaaaagtctgcaattttctgctccagttgtttatggatatcctgagttccgcagataaaacgaaccgaagacattccgtaaccgtgagattctatcatttcctgagaagctttcatcacttcaggatggttggataatcccagataattgttcgcacagaagttcagcagcttttttccgttggcttctatttccgcactttgctgagaggtgatgattctttctcttttgtaaagtccgtcgttttcaatattctgaagttcgttctgtaaattttcaagatactttttagagatcatttctaataatttttaagatgcgctaatttaataaaaaaagccgtttcatcatgatgaaacagctttgttatttattgccttatatttttacttctttaaaaactttacgttcttatcattaattttaaaaatatacgttcccggaaccaattctgaaatattgattgatttctccggctgatacattccctgtcttaccaatttaccgtctgtgaagtaaatggtgaaatctgtaggttttgtaatgccttttaaattcagttcatttttagccggattcggatataaagcaaattcttctttaactaaatctgcagttcccagtgtgttatcctgagttaccgtagaatttctgtccagaatctgatattcataattaaattctacacttgccaccggaaatgttaccgactgcgtaaaatattggttgttggacgtattattcaacgcaaaataagcaacctgccctcctgttccgtttactttgatcggtaaaggcatttcgaagaaacttaccgttgaactgctctgggtttgagatgctctgaaagtaacggtatttcctacctgcttccaacggatgtcatacgtaggatacccctgtccgtagatccagtcgttgaagaattctgtaaaatcctttccggtagacgttaataaagacgcattcagatcctgagttcttacatagttataagccaaattcggtctggaatggtaatcctgaattgcctgataaaatacagcatctcccaaaatccatttcagcattctcagtacataagctccttttgagtaagacagtctgctgctgaaaatagttcctacactggtaagattggcatcagcaacatatacacttcctgttggcgaacctgtaacaaagtttttctgagtcagcagataatttaaaaaatctgtatttgtcatcagcaatttttcattcgccacatgttctccaaaagtggcaaaaccttcattaagccagatgtcgttccacgcgccgcaggttactttgtcgccaaaccactggtgagccaactcatgggcaatgagacttctgctccatcccgccatggaagacatggtctgatgttccattccgccacctgcctgaaattccatgtgtccgtatttttcatttcggaaaggataaggtccgaagtaggtttcaaaagtattcatcaccgtttttgtccagtcgatgttattcatacttgtcgtattcgtggacgttgccggaaaaatataattaatgaacggaaaaggaggatttcccatcgtatccgtaagtttcacaaagttggtgatcgaaagtgcaattaaatatgctgcagtaggatactgtgttctccagaacgtcagtttctgaccatttcctaaaatcgtttcagacatgggctttccgttggaagcgacactgtattgtgaaggagtcgtcacttttatatctactctttcgattttatcgttcagactctgttttgtaggaaaccagtcctgcgctccgtaaggttcatttaaagtggataaaaccgcagttccaccctgtgttccgttaaaaaaagcgttgttggttgttgaaggcgctcctgaatacgtaactgttaaagaatccagcacatttgccgcaagagcagactgaaagttgattttcagttctttggtagacaactgttgaaaagtaagcggcgttccgtgatactgcactcccgaaactgtcatctgattatccagatcaaaataaatagagcttacactctgattgggtttaaaatgagaagttacggaacccgaaacattatacaccgccggattaatagtaagatccagcctctgatactggagatcgtaattcagggtattcgggttgacatttccgactgccattttgtgagcgaaagatttcatttctttcgccatcatcgcttttctttcgacattatcgttttgagcacttatttgctgaaaagtaagcatacacaaaactaaaaagtaaaactttttcatattgaatttaaaaaatatatcaaagatataaaaaaaccttccaatcgatgattaaaaggttttattattcgttaaattttaacaattctataaatctaaagcaggttcaagaattttttccattcttttctttaccatgtctacagatcctgcgtagttgttcaccattaaagagaaaaccagcgtttttcctgtattcgttttcatgtatcctgctaatgtttttactttattcagcgttcctgtttttgcaaaaacctgtccgtttccaagtccgttgaacattcttttcaacgttccggactgtcctccgatcggcaatgaatttaaatacgttttgtaatatttttcatccattaaagaggttaagaattttgcctgagcaatcggcgtaacgttattgcttctcgaaagtccgcttccatcgatataatttaaaccaagcatatcgaaaccttcatttttaagatgttcggttactacttttcttccggattctgtcgtctgatctccaagactctggaaaccaaccgttttcaacaacgcttcagccaaaccgttatcgctgtgctgattggtataataaataatgtccgctaaagtaggagatttatacacggaaactaattttctggcttcaggattggcatccgtcattttcggagttactttccctgttaccggaattccgctttttaccagagtggttctgaaagagtttgcaagataagccggagcatcgggtaattttgtcgttaaaattccgtcgccttcatatttgtctgcgtaaaccatctgattgttgtacggagaaacgtagaaaaacttcttatcggttgaaaagttgtttcctttctttacaatcagtttttcattggcaggattgatctctttcgttgtaccaaccggcaaatagtaattattgttttccaaccatacaacattttccggaagcttcgaaatattgcctttgaaaagcgctgtctggataataatgtctccatttacctttttgattccctcacgagaaagtccttctttgaaatctgtaataatgtctctgtaagcccaagctccgcctttattggttcctaaagaagggtctccacttccgacgatgtaaagatttccgtttaacactccgttttcgtccactgttcctgaatattcgagctgagtattccaacgataactttcgcccagcatattcattgctgtttcggtagttaataatttcgttgtggaagctggaaccaaaggagtattttcgttatacgaagaaattactttcttcgttttcgggtcgtacactacgaatccccatgttgcatttttcagcacaggatcggtcatcatagtgtttatattaatgtctacaagttctttcggcgacaaaatagttttttccaccatggaagtgatgggagaaggtaagtttaaactgctcttctgattgtcgtaagccggagaatacagaactgtagaaacggtagactgtgcaagaaaaaatcctgaagccagcaccgcaacacctgaaatatactttctgaaatttaccatctatttttcttttgctatagtttggatggtttaaaaatcaacgggttaaattgaaaagtaaaacaccaaacatataatcaacgatcaaatgtagaaaatattgttgtatggcagttcagtagactattataaaaagagtataaagtttgttaaaaattgttaaaaatctacaaaaacgtcttttctgatgctgtgatacgctgtaatttcatcgaattctttcagacttgctaaaaccctttttttatactcttcatacttttttcctttgggaagtttcagcatgatctggaactgatagagattgttaagtcgcgcaatttgagctttttccggacccaaaacacaatcttcgggaagatattttctaaggattgatcctaaaaactgggaagcgcggttggctttatcctctctcctgtgcttcagttctatcataataagctttgtaaaaggcggataatggaatttctggcgttccgttaaaatatatttatagattttcgccggactattcattttaattaactgaaaaacagaatgatccggattaaaagtctgtattaaaacttttccttttccggaaactcttcccgctcttccggaaacctgagtaatgagttgataagctctttcttcggctctgaaatcctgaacatatagcaaggaatccgctttcggaatagcaaccagctcgatgtgatcaaaatccagaccttttgagatcatctgtgtcccgacaacgatatcggtctcccgatcttcaattttttcgtataatttttcgtaggcaaatttctttctcatggaatccacatccattcggtccacttcatgatcgggaaataatttagaaacttcttcatggatctgctctactcctactcctctttcgttaaggttttcggaatgacatttcgggcagactttgggttttgatgctctctgtccgcagtaatggcatttcatttcattagcagctttgtgatacgtcatcaccacatcgcagttggaacagtagtttacgtaaccgcaggtttcgcattccacaacattggcgtaaccgcggcggttatgaagaacaattgcctgatttttttcttccaccacttttttaatctcgtcaataagctgcaaagaaaaatttccggatacttttttggactcctgagcttctttaaaattaatgagttcatactcaggaagattgacattcccaaagcgttcttccagaaaaacatatttcattttatcttttctggcgttataatagctttccacagaaggtgttgcagagcctaaaatgacttttgcctcataaaaattcccaaaaaccagcgcagcatcttttgcattgaaataaggagaaacctctctcggacggtacgcagaatcatgttcttcatccacaataaccaacccgacattatgaaaaggtaaaaacagagaattacgtgttccgattaaaactttaatatcattctgcctgattcttctccagacttccacccgttcaaaatctgtaagtttctgatggtaaaacccaagttgtcttccgtattttttttctaatcgtcgagtgatctgtttggttaaagagatttccggaagcaaaaagagtacattttttccttcgctgatgcattcttcgatcttttctaaataaatatgggtttttccggaagaagttactccgtgaagcaagacattttttccttcttcaaaggcttcatctacttcatttttcgcttctttctgggcttccgaaagttcttcgatctcttctatttcaccttcatagctttcgatacggtctttctgcatataatattcttcgaccagatttttatctgccaaagccttaaagtgcgaacttccgaaatatccgtcttcaaaaagttctgattttttgatgggcaaatcaggattttcggtctgcttttctaaaatgtggaggaaaaggtctttctgcttttgcgctctttttaaggataaaagtatttccgtaagattttgacgctgtaaaacctcatcgttgatttttacgtaggcaacttctttcgctctgtatttttcggcaattttctcgtcgatttcaatgtattgcaaatcgattaacgaattgatggttttaatgatatcttttttaggaataaaagcttcaatatcagtcagattaatcaattgccgtacttccaaagcctgaatgagatacatttcgttgacatcgaggttctcaaagtcaacttttacattgggctttaactttaaatatgtttcactttcgagtttcagggacgaaggaaacgcaaaacggtaaatttctcccaaaccgcataagtaatagtcggaaagccagttccagaatttaatctgctcctgcggaacaatcggctgatcgtcgagaagactgataacttctttcgccacaaaagtctcgggcgcattgttgtgaagttcaaaaacgattcccgtatagatttttttgccgccaaaaggaaccaaaaccctcattcctgcctgaattccggtttgcagctcttcaggaactttataggtgaaagatccttttaggtttaacggtaaaacaatctgggcgtaattcaagggaaaaatttaaagtgtaaaattaattttttcttttgtgaactgcaatttttttgatggcgtgtttttatgggatacttttaaacgcaatgaccgctaagattttctttaaatgattatgtatattttttcgttcgcaaaggcgtttgactcagcgaatgagatgatatatttaaagcttattatcaaaaggagttttgattctttgggagcagaatcggtgtataaataagaataaatctatcaattcgtaggattgatatgtataatacgataaatagtctaaagatagcgttcctacggaacgccaaacgccttcagaatatgatgtctacacagataaaactctatagagttttctgctattttacttaaataaacctgagttcgggataagaaataaatttagataattgatttatagcattatattaatttatcgcaaagaaaaacaaaagatttttctacttattgaaagtttgcaagctaaacaaaggcacttcgtttatttaaaaaagacaaaaatgatattactttgagaagttttacgcctttgtatatcttaaaagctgaattcctgataattgaatctctttgtttacccttgcggttaagaagacttatcccgaactcaggttaaataaacatcatttttttcgttctgaaagactctgaaacattcaaaatttttaaagtttatctgttcaattggagattgtttcgttgccatgagtttttatttagcccggattgcaacggcatccttttgggttgcgggcggagctaagcggagcccgtaacccaaaagatacagtggaaagccggaaaaagctccaaaaaaatgttgaagggtttaagagtttgagggtttgagagtttgagagtatgagagtttgagaaagttaaattttagtccaatgtgaaaattcataatcaaaattgattttaaccgaaatttagcatacgttttggctaaagccaattgttatcttaatcattaaaataggataaatccctattgatgtttttgtattgtttttacatcgaactaacgttaaaataataaccttcttttacccactaaaaaagtaatcgataatgtaaaaccagactgcggaagtaaaaaaagccgcaataatactgaagccgatcgttaaattggtaagttttgtatttaatcggtactgttccgcaataatgcttgaggtaacgactgtaggcattgccgattcgaagatggtaattctggcgatatttccttttattccgagtaaaagtgctaatccgagcgttattgccggagccagaataagtttgtaaaacatggaaaccgacatttggggaatcagttttttccagccattgaatttcagttgtaatccgactgaaaataaagctaaaggactaaccgtggctgccagtttatcgaaaaagggttctgcggaagtgaaatctacgaactgagacagaatcaatgcaacgatacagccaattaaaggtggaaatgtaacgagacgtttcagaataaatgcagcgctgatctttccggatttgcttccgccttttaaagcagcaataattcctaatgttgaaagtgcaaaaaacatggtctgatcacagataatggcaatactcagtaaactttctccgtaaaaagccgaaatgagcggaaaaccgataaacgaagtattgctgtagccgcttacgagttccagagtacttcgggaacgccgagaatagcctttgcttctgctgtaaaacatcataaagaaaaagcagaaaaccgctgtgagaaaagttgccaccaccggaaacagcatttctgccgaccagtgaactttcggtaaatatttgaatgaaaccgccggaagtgcaagataaagaatccatgtgttgattcccttatgcgcatcgggatgaatggattttgttgctttgaaaaccattcccgcaataatacacactgcaatcagaacaaaatttaccatagttttgaattattgtgcaaatttacggttgatttctttttaatcgcttatttcccattatcaaaaaactttatttttgtcattctgacgaagaaagaatctattgcattggctacaaagtatttttaattacgattctgaactccgtttgtaaactttctgtatatattcagaatagcagctttatataaatccaatatcaattcatcgtatcaaataagctcattacctctattttctccaattgttttgaaagggtaattcttttggatgtttttggaagcaaatcgaaaaaattatcgctgaaatgggtatctcctatcagataaacgtcttttgccaaaacatctgtggaaatttcaatttcagtggcagatattttcctgattttgaggttgggttttgttaattttaaatcttttggctttgcgaagaaatagttgctttcggcaattattttttcatcttttcctcttaaaattacatttaaaaacagttcatttttatcagcctcaccgactagttcattgatagatgaagaatcaaactttatagctccttcccaattctgtttcggggttgaaactgcagcaagaatattctcacctttaaaattattaacttcaaactctaagcttacgtctttaattgtatcagatccgtcattaattccgtaaaaatttagaattccctccttttcttctaccaaaatcacctgattttcaaagctccttttcacctgataatgcaatgctttccagtttcctaaataatctatggaagaccacgaaacgacaggccaacaatcgttgagttgccagtataaagttcccatattataaggttttgctctgcggtgtgcttcaatggcaatctgcattccgcgagcctgaagcaattgcgaaacataattgtatttcacaaaatctgtcggaactttataatcacgcttcatgtaattttcaataatttcccagcctctggaatgcttttcgtgagctttaatggttccattttgtaagcttaaatcaggatttcctgaaaacatggattttgtagtttccaatgttgacattccctgaaaaccatattccgaagcaaaacgcggaactttttcattataaatttcaaacggctgttctccccaccaaacgccccaataatgggaatcgccttccgtaaggctttcttgatgtccccatccgatggatggcgagctttcccaatagatttgcttatcacttgttgcatattttttaacagcgttcggaattacttcatgaaaaattttcttgtaatccttccaaacctgtaaagaatcttcttttgaatatttaaattgtttctgataaccccaattgacaatcgcttcatcgatttcgttatttccgcaccacaacgccagagaaggatgattttgaagcctttcgatctgatcttttacttcaagttcaacatttttctgaaatttctcatcagacggataaaaacttcctgcaaacataaaatcctgccacaccaaaattccgttttcgtcgcaggctttgtagaattcgtcatcttcataaattccaccgccccaaacgcggatcatattcatattcgcatctttacaggctttaatcaactgctgatatttttctttggtcattctcggagaaaagctgtcgcccggaatccagttggttccttttgcatacataggttttccgttcaccttgaaataaaacgattttccttttgcatctttttcctgaattaattccaccgttctcagtccgattttttcagatttttcagcaatcattcttgaatctttttgtaaagaaactttgatatcgtataagttcggatcgccccaaccgttgggttgccataatttcggattttgaatctggtaaggaattgaaattaaattcaatccggattttaaagaaatattttgagattttccgttaattgaaaaagtgtatttcccttcttctttagtgaaaatttcagcacgaatatttaaatccgctttttgctttgttaaaattttttgctcgatttttatattatcgagtcttgcaatgttccagaaattcaatttaacgtctttccagattcctgccgtcactaatcttggtccccaatcccaaccgaactgatattgagcttttctcacaaaacttctcggaaattccggcatggtgaaaggaactttttgggctaattcttttccgacattaaccgcagatctgaattttacctgtaaaatattttccccgttctttaaactttgtctaaccggaattgtccattttctgaacatattgtctgtcgattgaattaattttccatttaaataaatttcagaaaacgtatccaatccattaaaaatcaattcaatattttgattttctaaatcctttgaggaaatgttaaatgatgtctgataatcccagtcttcattttctatccattgtacttttttttcgttttcatctttatacggatcgggaataattttgttattcatcaaatccaaatgaacagttcccggaacagaagcagtcaaccaattattctctttggaatttttgaatttccatttttcggaggataaattgcgctctgaagtttgtgcattggtaaagatttgtatgaaaaggaaagtaaaaagtaaaattttgttcattataatttatttacaattctatgaattccatctttaataagtggtgtattaaagttaataagaagcccaagttttatgtttgccaattttaaataagttaataactgggcattaaaaacaggatgtatttccagtacagattttacctcaattattactttgtcttcgataagcaaatcaattttgtaagcattttcaatattcatttctttatattgtaagggcagataaatttgccgtttcacattgaatcctaattttttcaattcatatgctaaagctgattcgtaggtactctctaataaacccactccaagatttttgtgtacttcgattgctgatcctattattttataggataattcattttctatcatttgatattgtgtttttgttttttcacgcaaagatttaattttagtgattactaaattttaagtgggcaaaagaagaatcaattaaaaattgattttatgaagctaagattttagccattcagcttaatcagcgactttgtcgcaatactttactcccttaagtaaatatacagttgaataaatctttgcgttaaaattcattttattatttattcttcaaagcaacaatctcttcagaattcgcaaaagctccgccatccgtaattgctgaagaatgaaaatatcctgcttttgtaaactcccgtatttcctgaatattggacgagcgaagtccgccaccgacaagaatttctattctgccattggataacgctactaattttttaagattttcctttccttccgaaacattaggtttctgtccggaagtaaggatggttgtaaagccgcattcaatgactttttccaatgatttttctaaatctttcgcccggtcgaaggcacggtgaaacgtacatggaagaggttttgccagttcgaccaaagttttattctgttcaatattcacctcatcattttcatctaaaattccgaacacgaaaccgtctgcgtttaaagattttaattgaaccatatctgatttcatctgctcaaattcttcatcggtgtaggtgaaatctccaccacgcggacgaaccatcacaaagattggaatattgattttttctctaagctgttgtacggtttcaaaatccggtgtggttccgccttcgcttaatccgtcgcacaattctattcggtctgcaccgttttcaaaagcgattaatgcagattccggattgaagcatgctatttctatttttgacatctttttaatttaagttttggctaaagccaatggattttttattttgaaaaacgggctaaagcccgttcctattgatgactacatctattttaatgcaaaatctggtttttccagacggtttcctttctgatcgtacacggcaaaactaaacccatcctgaatgcagtaggagccatattccccttttttattaagggcaataaaacccacctgaatatccttcagatttttatttctacgctgtgtaatttttacaattctttcaaccgcttctttacaagcctgttgcggcgttcttccctgtctcattaattctaccaccaaatgcgttcctacggttcggatcacttcttcaccatgaccggttgctgttgctgcacctacctcattatcaacaaacaaacccgcccctataattggtgaatctcctactcttccgtgcattttgaaagccattccgctcgttgtacaggctccggaaagatttccgttcgcatccagagcgatcattccgattgtatcgtgattttcgatattgacgatcggctgatatttgctgtctttcagccattctttccattctttttcggattcgggagtgagaatattttcttttttgaatccttgtgaaacggcaaactgcaaggctccgtctccaaccagcattacgtgaggcgttttttccattaccgcccttgcaacagaaatcggatttttaatattctccagacacgcaacagatccgatgttgtagttttcatccataatacaagcatccaaagtaactcttccgtctctgtcgggacgaccgccgtaaccgacgcttctctcttcaggatcattttctacgaggcgtactcctttttcgactgcatccaaagctcttcctccttttccgagaatcgtccaggcttcttcattggcttttaaaccgaaattccatgtggaaagaacgatcggtttattaatgactgtattgttattttcaggctgatttttagctaacagatccaacggatttaccgctaaagccagtgaagcgacggcagattttttcagaaactttcttctactttgcatactcagatttatttggctccaaattaaggatttttcgcatgaagatgaaataaaaaaagcggtagattttctaccgcccaaatgattttattgaaaattaatgaggtaatttttccctgaaatatccatacacccaagttccgaaaatggcattcagcaaagtaatgattacggcaaaagctccggttccgatctgtgcgaaaagcggtccgggacaggctcctgtaatcgcccagccaaatccaaagatcagtccgccgtaaatttgacctttattaaatttcttcggagcaatagaaattttttcgccataaatggttttgatattaaattttttaatgatcaatacggaaatcattcctgttaaaatagcgcttccgataacgccgtacatatggaaagactgtaatctgaacatttcctgaattctgaaccagcttataatttctgcttttacaaagatgatcccgaataatattccaacgatcatgtattttaaattgtggtaccatttgtgatgaagctgactttcgttggtacaaatactgtcctgatgtcttctatctttttcctgtttcatttttaaattttaaagtgaaagaattataggcagaataacatttgccattaaaaagcctcctgccataaagcagattgttgcaattaaggaagcgccctgaaggttggaaagtcccatgatggcgtgtccgcttgtacatcctcccgcataacgcgttccgaaacctaccaaaaatccaccaaccaccatcataataaatcctcttatggtaaaaagactggtaaaattcatgagttgtgtcggaacgagattgctgtaatctgtaattccgtaggttgctaattctattttgagattctggttaacggtaatttcttgtgaattcattaaaaattgagcggcaatcattccgcctaaaaaaattccgaatacaaagaataaattccagagttcttttttccagtcgtatttaaaaaatccgatattcgcaggaatacaggctgcacagatatgtctaagcgacgagctgattccgaaagatttgtttcccaaaatcagcaaagcaggaacagtaagcccgattaatggccctgcaacgtaccacggccaaggttcttttatgatttctaacattaagtatttgtattaaaactgttttatattccgactgattttggatctccaaagatcttttgtctctttcattgttaaatctattttaaaattttactctggcaaacaaaatcacttaccggaatgtctgtttgagaaattgcgttgaacccgccttcaatttcactaaaattgcggtagcctcttgcctgaagaatacttgcagccatcatacttctgtaacctcctgcacagtgaagatagaaatgttctgccggatcgattgaactgatccattcgttgatgtatgccaaaggtttgttgaaagcttcatctacgtgttctgcattgtattcactttcttttcggacatcaataattttcgcttctttttctttaatttcctgttcaaattgctgtgcggaaattctgttaatggaatctatttcttttccgctgtctttccatgcgttgaagctaccttttaaaaatccgagaacattgtcaaatcctacacggcttaatcgggtcacggtttcttcctcttcattttcattggtaatgagcagaagtggctgttttacatccactaccaaagatccgacccaaggtgcaaaatcgccattcagtccaatattgatggattgtggaacaaatccttttgcgaagtcttcgttatttcgtacatccaaaatcaaagcacctgaatgttctgccatttcttcaaattcatccggggaaagagcctgtaaacctttagacaagacttcatcgaaactgtcgtagccttttttattcattgccacattcattccaaaataagccggaggcggaagaagtccgtctgtaaccgctttgatgaaactttgtttatctctctgattcaaggcgtaattggttttcttctggtttcccaatgaatctaccgtttctttctgcatattttttccgcatgcagaacccgctccgtgtgccggataaacagtgatatcatcattcaaaggtaaaattttgttataaagactttcataaagtaagcctgccaattcttcctgcgtcatgtttgctgctttctgtgccagatcgggacggcctacatcgcctaaaaacagagtatctccgctgaaaagtgctgtttcttttccgttttcgccaatcagtagaaaagatgagctttccatggtatgaccgggtgtatgaaggacttttatagtgatatttcctactttaaaaacctgattatcttctgcaataatggcttcaaattcaggttttgcagtcggtccgtaaacaatcggtgcattcgtttttttgcttaaatctaaatgtccgcttacaaaatccgcgtgaaagtgggtttcaaaaatgtatttcagcgtaacgttatcttttttaagacgctcaatataaggctgggtttctcttagcgggtctataattgccgcttcaccgttagaaacaatgtaataagctccctgtgcaagacatcctgtataaatctgttctattttcattttttatgattttaaattttaattattttttctgatacaaatttcttggtttgggattttctgtaccgctacttttgttacagaagggttttatttttgaacacaaagtccaataagattttttaactattatgcttttgggggttcacaaagccactaacgcttataagagattggatttcatggtttttttaattaaaattaactttaaccgaatttagtataagttttggctaaagcctattattttcttgattattaaaatgggctgaagcccattcctattgatacttttgtactgtttttacatcaaactcacgttaaaacactatgtcctaattactatgtttttttgggtgtcagaaagccgctaacgcttataagagattgaaattcatgtattttaattaaaattaactttaatcgaaatttaatacaagttttggctaaagcctattgttttcttgattattgaaatgggctaaagtccattcctattgatacttttgttttgtttttacatcaaactcacgttaaaacactatatacccaaaggttttttaactaccattgtttttgagtatcacaaagctgttaacgtttataaaagattggatttcgtgtattttattttctaaattcagaaatttaaaaaactttgacattttttaccccgaatctttcgcagcccgacctgagtgaagctctttttgttttttacaaaacaaaaagactgggagcccttcgataaactcaggataaactacaggcggaaacagatgccctaataaaaaaaactataaaaaaatttctttaatgatgatataaattcccattacaagaatgaaccatccgaatgccggtttgagtttttttccgtcgatttttttggataactgcgaaccgatgatgataccgacaatagcaattgatgaaatggtggctaataatttccaatcgattttcacagcatccatagatgagaaaaatccgataagcgaattgagcgaaatgattaccagtgaagttccgatggctactttcattggagttttaagaagattaacgagtgccggaatgatcataaatccgcctcctgctccgactaaacctgttaaaattccgacaacagatccttctcctgctgctaaaagggtactgtttttctgtaaatctgatgttttggtaacacaatctgtagttttctgaatcattttgtaggatgccaaaatcattaatcctgcaaaaattaaaagcaacagaatatctttggttaccacaaaattgctgacggtaacaactttagcgggaattaagggtacaatataatttcgcgtcaggaaaatagaaataatagacggaatgccgaaaacaagggcggttttaaaatttaccagaccttttttaaaataggaaactgaaccgaccacactgctgatccccacaataaaaagggaatattctgttgccagaaaagcatctaatccgaaaaggtaaaccaaaacgggaacggtaagaatgcttccgccgccaccgattaaacctaacgaaattcctattaaaacagaagcgagatatccaaaaatttccatgttttcaactttatagtgcaaaattgaagatattgggaaaggtgtaccgctacttttgttacagaacggctttttaatgctaagtttgcgaaaatttttactttagttgttatgttgaaaggatattaatattttttttgatcgccaagttcgctaagatttttttactactatccttttttaagttcgcaaagccgtttcacttagataagaccgctaagaaattcagggaagtaatatagaatctttgtaaacatttaacagaattacatttgttatgttgaaagaatcttaagatttttttgatcgcgaagttcgctaagatttttttactactcaatgtttttaagttcgcgaagttacttcgataagctcagcataaactattcacttagataagatttcgaagagttttgtctaatcttttaaaatcgtaattttatttcgtccgagctggagtttttcggagtcttcgagctgtttcaggagtcgggaaacgacgactctggctgttccaagttcattggcaagctgttcgtgagtaattacgatggttttggaattcagaatttcggattttttatgaagaagattcagcagtctttcatctacttttttaaaagcgattgcattgatgatatccaagagttcttcaaagcgtttatgatacagcctgaaaatataatcgagccattccggatattctttaataaacaatgaaaccttgtcaacaggcagaaacaggatttcggtatcttcttctacttccgcttttacgatgcttttttcgttgtgcattccgcccagaaaagacataatgcagctttctcctgctttgatgtagtacagaagaatttcccgaccgtcttcttcggtacggatgactttcatcatccctttcattacaataggaatggaacggatggacgaattttcatccagaataatatcaccttcctgataagttttcgttactccgtattggtagagtttttcaacgagttccggcgaagaagtaaattctgaagaaagtactgaattctgcataataaaatttctaaggctaatttacaccaatttcgtcaacaaaaagccatgctttagaatctgcacccggatttcccgcaggaataatgcctgcattttctattttaaccttaataaattttgaattctggtttcctacattcactttaatttttccttttgctgaaaggatttcttcttttccgacttctttgattaacttaaaatctattccattgtctgacacaaaaatcttggcagaatttgcgaaatgaatccagcttcctttgttgtctaaagtattgaaatagacttccgaaaactgatttttctgtccgaaatcaatggttgccaccacatcttttccattaaaaccaagccatgtttttcctaattgcttttggtttccagtaattccgtcgactaaagtaaaagctccgccgaaagaataattttcactcggctgttcttctaatgtaattttttttccggttgttttggatatcataaaactttgggaagatacagcgcttttaagttgtccattttcgaaataggcagatttaaccgtcattgattttgaaatctgaacaggatttttatacgtctgagaattagctgaaggatccgttccgtccactgtatatcggattccgtccggattttgtgaggttgaaagctcgtaagctactccattttcagaagaaattactttccctgaaacattgtaaatgcttttggcgtaattcactcccattttatccagacttttgaattcattaattactcttccttcgaattctttgtaatttttaggatcagcagttccccaacccacctccgaaagcgccagtaatcttggaaaaatcatatactgaacatggttgaaatcaagaatatactcggtccacagatttgcctgaactcctaaaatgtattttgcctgttcagcattcagttcttcgggaattggattataagaatagactttatccaaaggcgtaaatcctccgaaagcattgggttccgtcgcaggatctccctgataatgatcgaaataacagtaagaaccgggagtcataacggcaaaatgaccggatttggcagcttcaaccccgcctttaattcctgtccagctcataactgcggcattcggagccagtccgccttccagaatttcatcccaaccgataatttttctgccttttgagtttacatatttttcaattcttcggataaaataactttgcagaccatgttcatctttaaggttattttttttgattaattcctgacaatgtgcgcattctttccatcttgttttcgggcattcatcgcctccgatgtggatgtattgcgaaggaaaaagggcgattacctcatctaaaacattttctaaaaaggtaaaagtttcgtctttcggacagaaaacatcatcaaaaacgccccattttgtcgcaggttcaaaagatccttttgtacaggctaaatccggatacgcagacaatgcagctaaagcgtgacccggcatttcaatttcgggaactatggtaatatgtctttcctgagcatattttaccacttctttaatctgatcctgcgtataaaaatacggtccgtaaggttttccgtcgaaggtattgtcaacatacgctccgatcatcgattctttacgttttgaaccgatctgcgttaatttcggatattttttgatctcaattctccaaccctgatcgtcggttaaatgccagtgaaacgtattcagtttatacatggcaagataatcaatgtattgttttacttcttcaacggtgaaaaaatgtctggaaacgtccaaatgcattcctctccattgaaattttggggaatcatggatttcgagagcaggaattttaccgtcttctgaagtttttattaattgtagaagagtttgaatgccttgaaaaagaccttcagggttctttccaataaccatcatcatttcgttactgatatttataatgtaatttgaattaaactctcgtttattatcaatttttaaatctttatttaacagtagcgaaataaaatttggttttgttttttttatgttttgagatgaattttttggatagatttttttaaaattatccataaaatatttgtattcattcgattttttgtctcccacgaaaagtgtattcccgcttacctcgaaattccctgtttttaattcaaccttttgcggatagggaattaaatttaatctggtttgagtaaaaaagagacttgaaaaaagcacagaaaggatcagtaaaaaacgctgcattttgtggatttaagatttaagcgaatatacttattttctgaaaattttaaagatgatttaacttattaagaaacaaaacatctaattttgcaaaaaataaacgatgagaaaaacatttcttttgataggcggacttttattttcagtttccgcacaggcacagattttagatgttataaaatctaccgtgaaagatcagacgggaattgatcttaacaatcctaaagttccggctcaaaccagcggaacggcaaccacgccaaaaacgacaacaacagcatcatccgttaatctgggaagtcttacatcaacccaaatttcttcgggactaaaggaagcattaagtctcggtgtaaatgaaggcgtgaaaaaattaggcgtaacggacggtttcctgaaaaatgaagcggtaaaaattttaatgcccgaaaaactgagaaaaatcgacactactttacgctctatcgggttgggaagtcttgcagaccaaggagtgaaattgctgaacagagccgcagaagatgccgtagtggaagccgccccgatctttacgaaagcgattacttcaatgacgatcacggatgctaaaaatattttactgggaagtaataatgcagcgacaaactatttacagactaaaactcaatcgcaattatttacagcgtttcagccaaaagtgaaagcttcattgggaaaagtgggagccgataaagtctggagcaatattatttctaaatacaatacttttaccggacaggctgtaaccacagatcttaatgaatatgtaaccacagaaaccattaacggagttttcaaaatggtggcagaaaaagaaagcggaatccgaaatactcctgccatgagaaccacaagtattttgcagaaggttttcggagcgcaggacggtaaataatatacgctaactgagactttattctcttttaatacaaaaataccatccatcttgcagactgcaggatggattttttatgtctgataaagatttacacggttttttttaaaaaaaactaactgataatcaaactattgcatttcattaattaaccttcagacaaaatggtattactttgataagttctatgcctttgtatatcttaaaaactgaattcctgataattgaatctatttgttcaaccattgcgattaagaagacttatcccgaactcacgttaattaattatattagaattaattcagtacaaagatttgtgatctaaattgtttttaatttaaatgctgataagtttagactagagccaattggttcctaattgttaaaatgaaataaagccttctcctattgaatcttgtatcgttattattttgaacttttaggacattaaaaatgttgtggaaatgttagacgaattttaacatgaaactgaaaaataactctaatttttgcaagatcttttttttcaatcatttttactttttcaaatgtttcttttttcatagaattaagaaaaaacatccttcttgctattgattttgggagatttaaaaagaagaatattttataaaacatgataaaaatcatattttaaaatacacaattaataaaataaattactgaatatcaattatttaaaatttaaagttaacattatattaaaaaaaataaaatttttattaaaaaaagtttaatatagaagccagataataaaatcaaattgcgcaatcgattacacaaaagtttttaattcgttttttcaacagaattccgggaagtagctaagctctgattcttattgaaaagaaaaacatttaattcaaaaaaaaactaaaattatgtcatctgaaaaaatagcaaaatccggctttctgattcgaaaaaagcttgctgttttgtttctgttttcctctgtagcagtttttgcgcagcagggtaaagaggtaagcggaaagattactaacaacaagcaggctcctgttcctaatgcaacggtgaaggaagaaggtacagaaaattctgttactacagatgctgaaggaaatttcatcatcaaactgcttaaggatcagtcttcgctttctgttgaaaatgaaggatttcagtcgcagattatcccggtgaacaaccgttcttttatagcggttccgctaaaggaagaaaaagcgaaaagcatcgagcagattgtactggtaggttacggcagcgttaaaaaatcagatcttacaggatctgtaaatactttaagtaccgacaaaattatagaacgcaatactacaagtgcactggaaggtattcagggaagtatgcccggagtacagataacttcgaattctgggagagtgggcgatggttttaaaatgacgatccgcggaaataactctctcatctcatccggaaatccattatatgttgtagacggagttcctacggataatatcgattttctgaatcctcaggatattgccagaatggatattcttaaggatgcttcttctgctgcaatatacggttccagaggagcgagcggagtggttttggtaaccactaaaaacggagctaccgtaaaatccggagtaagtgtttctctggaaacttcttatggtgtaagaactgccgcccgtttaccgaaaatgatgtccggagaagaatggtggcgctttcatcaggcagcatatctcagcgcaaatcctatgacccagactcctgcacaactggcaacacttgccggaaaccagagtcctcttcttgtacagagagccaataacggttataatttcgactggtatgatgcggtacttcagccgggttctacccaaaatcattacattaatgtttcgggaaggtctgaaggaggactgggatataatttatctttcggtattcagggaaatgaagggattattgccaatgattctaacgacaagtatacttttaaactgggaattaatcataagatcaattctaaatttacaactggtgctaatataacggttgcaagaactgttacagaatacggaagtgatcttgccatgagatcggcattcagtttcagtccgcttatttcgccttacgcagtagatgcaaatggaaacgatattccgggacaactgtttttattacccggaaaacttacatatccggacggatcctgggcaattaataaaacaagtaccatcaaccctcttctggaaattgccaactccagacaaaatgaaagggtgtggcagactttgggaaatttattttttcaatatcagcctaaaaaatggctttctttaaaaactacattttctgccggattttcaaactcaagactcgggatctccaacacagcagaaacaaatgtaggtattgcgcttaacagactcaactctgcttctgtaggcaaaactgaaaatttcaattatacttgggataatcagattgatataaaacatacttttaaagatgttcatgatgtaagtctgttgttgctgcaaagtatttactctaatgaagaagaatcttcctatggctattctaacggacagccttttaattctgaattttataatctgggcttcggacttcagagcagttatcagcttcaggcggctccttacatgaagagaactcttaattcttatgctgtacgactgaattacgggtttaaagacaaatatttattgacggcatctacccgatgggatggttcttcggtattatccaccggcaataagtggactgcttttccttctctagcattgggatggaaaataagtaaggaatcttttcttgaaaatgtatcttctatttcagaattaaaactaagagcaagtatcggatatacaggaaacgacaatgttgcaccttatcagtcgcttgcattactggatcagcagactttttatgctaatggcagtacactcgttccgggattacaatcctcggttttcgcgaatccgctccttacatgggaaaaaacaagggagcttaatttcgggctggatttcggatttttaaaaaacagaatcagcggtactgttgatgtatacgacaggctttccgataatctgatctacagacaacagcttcccgcagaaatggggattaaatatacctactcgaatgtaggatctgtaagcaacaaaggggttgaagtattactgaccacaaaaaatattaaaagtaaactcataaactgggagacgacttttacctttacgaaaaacgtaaataaactcgaatctatttacaatcaggatcaggtaagcgataagggaaatcttcttattttaggttccagcttaaacccgaatttcaattatgtgtacgacggagtttggcaggaaagtgaggcagcgcaggcagccgcttacgggcaggctccgggaatggcacgtccgaaagatcttaacggcgacggaaaatttgatgcaaatgacagaacggttatcggtagttcggttccgaaatggcagggaagtttttactccagacttacggtagggaaattcgatttcaatttttctattattaccagtcagggacaaacggttctcagtacttttcatcaaaattttgctgatgtttcagacagaggccgtcagaaaatggcgatggaatattttgtaccaactaatagtgcaggacttgcagctaatgccaatacgacaaatccaagaccgggtccggttgctacaggagcaggagcattttggtctacaggattcgggtattacagagatatttcttttgtgaaggtaaaaaacatttcgcttggatatacttttgattcggaattcctcagcaaaataaagatgagcaatctcagagtttacattaatgttctcgatccttttgtatttaccaaattcgacggatatgatcctgaatgggcagccgcaaatatcgggatcaacagaccggcttcaattactacacaattaggactaagtgctaaattttaattctacaatcatgaaaaagatattcttaacattaattttcgccgcctcgattttcaattcctgcagcgattttctcgaagaagaaagtttgtctaatgctcctgcagacgatgcctataagactgcggtagggtttcagttacttgtgaacaccgattatgcatggttaaaaagtatctatggtggagatccgtggctttttgtagcgggtacagatatgtatgcggaaggaagaacgccggaaccggcaggtctcagccaatatactcagcttattcccgcttcagaaggtgtggatcagttgtatacatcctgttatcagcttattcaggcggtaaacaagactgtatactattccaaaattacagaacagaccgccaatgttccggtattggtgggagaagcaaggtttttaagagccaatgcatattttctgctggtgcagacgtatggcggagtaccgattgtagaagagaactttactttgccagttcttcagtttgacagaaattcagcagaacaagtatatacgtacatcatcaatgagttgaaagcttcacttgcagcggtaggaacacaagcttattctaccagcggaaaagttaataaaagagcagtgaacgatcttttggcaaaagtataccttacccgaggctatgagactttcggttcggcttcagattttgcaactgcggcaacgtatgcagatgcagccatcgcaggacagggattaacaattgctcctgctgatttattttaccccggtaaagatcttaatgctgaaactattttttctgtacagtatgattttgcttctaccagtacatctcctactacccttggaaacaagcagttttactatttcagttcatatcttggcggtgcagaaaccaatggtaacgctccgttaagaagttataatctttgcccgacatcttacgcattgaatttatttaaaaaaggagatctgagatgggagtctacctttatgaacgtcgtgtatgaaagatattacgactttttcagagtagcagataaatctacgctgagaattaaacatttttatgaacctttatggtataccgcagcagataaaacagcgtggctgtctgccaatgcttcaaaactcgctccgggatttgtttaccacgacaaaggaacttttgatgcagcttatactttggtgaagaatctggattaccagaccattcctgtgaaaaagtttgatgatccttccccttcaactccatccagcacgggagccgtaagtacgagagatattattgtttcaagacttgcagatacgtatcttattgcagcagaagcctatttaaaatcaggaaattctgctttaggacttttaagactgaatgcagtaagagcaagagcgggagttccggatgctacaccggcagaatttaacatcgattatattcttgatgaacgcggcagagaaatgcttggagaatacaacagatggtttgatcttaagcgtacaggaactcttattacgagaactgtacagtacaattataaaattacaagtgcttctaacttcaatggtaataacggagccaagaaaattttaagacctattccgcagacggttttagatcttaatcagaataaaaattttccgcaaaacccagcttattaatacactattcaaaaaaataatccgcctttatgagacggattatttttttattgtgctaaaactgcatttccggaatttctccttcaataatcagatcagcttctgtagattgtataatgtgctccacagaaactcccggagctctttcaacaagtttaaaaccttgaggcgtaacatctaaaactgctaattctgtaaccactcttttcacgcagtttactccggttaaaggtagggtacattttttcagaattttgctttctcctgctttgtttacgtgcatcatcgcaacgataatattttctgccgaagctacaagatccattgctccgcccattccttttaccatttttcctggaattttccagttggcaatatctccgttttcggcaacttccatggctcccaaaatggtaagatccactttctgcgctcttatcatcccgaaactgaacgccgaatcgaagaaggaacctccgtctaagatggtaatcgtctgttttccggcattgatgacatctgcgtcttcttctccctcaaaaggaaatggtcccattcctaaaactccgttctcactctggaactctaccgaaagattatccggaacgtagttggcaaccaatgttggaattccgattcctaaatttacataatatccgtcttttacttctcttgaaattctttgtgcaatttgttctttagtcagcatagcttaatcttatcctgccaaattagccattttttcagaattacgaaataattttctttcttatcctatgataaatgttacttcttaaattgttgtaaatttgtatgccttaatttaaccgatgaaaattttattacattaccttaaaccttataagtggctgattattatttcgctgtttttagccgctgtaaatcaggtattttctttgtttgcacctgccattacagggaatatattagacaaacttgtaacccatcccaatttttttgataaagagaaaactcttccccgaaatatggaagactatctttacggaactgatatctatcatggagttttttactttttagggcttttaatcggtactgcgatgatcagccgtatcgccaaagcgtttcaggattatgtggtgaatgtgattattcagaaattcggggctaaaatttttacggacggtctgaagcattcgatgagacttccttttcaggaatttgaagaccagagaagtggtgaaacgctttctattttaacgaaagtacgtgaagattctgtaaagtttatcaataatttcattaatgtcttctttggaattttagtgagtatcattttcgtttctgtgtatgcaattcgtctgcactggtcgattatgccggtttatgtagtgggaattatttttattgcagtggtaacgaatttattaagtaaaagaataaaaaccattcagaaaaatattgttaccgaaacaaccaatcttgcgggaagtaccacagaaagtctcagaaatattgagattgtaaaaagtttaggactgaccaatcaggaagtggaacgtctgaacaacaatacctataaaattctgaatctggaactgagaaaggtaaaaagtatccgttccctgagttttgtacagggaactctggttaattttttacagcagatcatcacatttacgttgctgttattaatttttaaaaatattgtaactccgggacagtatttatcgttaatgttttacggattctttattttcggaccgatgcaggaaatcggaaacattatcatttcttaccgtgaagcgcaggcttctctgaataatttcgaccgggtgatgaagaaagaagtggaaccgaaacctttaaagccaaagaaaatcggagctattgaggagcttgagtttgaaaaagtttcttttcagcatcagactgcgcattataaggctttaagttctatttcctttaatgtaaaaaacggagaaaccattgcttttgtgggaccaagcggttcgggaaaaagtactctggtaaaactgttggtgggattgtacagaccgcaggaaggctctattttatacaacaatatcaacggaaaggaatttgattttgatgaactgagaaaccagatcgggtttgtaacgcaggacactcagctttttgcaggaactattaaagaaaatcttttgtttgtaaacccttctgcaacggaagaggatttgcagctggctttaaaaaaatcaagctgtaccgctcttttggaacgtgctgaaaacggaattaataccgtgattggtgaaggcggactaaaactaagcggcggtgaaaagcagagaattgcgattgcaagagcgttactgagaaaacctcatttgctgatctttgatgaagctacttctgcactggacagtattaccgaagaggaaattaccacaaccattaaagaaatttcaaaggaaaaagagcagattacggttcttattgcacaccgtttaagcacgattatgcacgccgacagaatttacgttttagaacgcggacaaattgtagaaaccggctctcatcttaatcttattgaagaaaaaggtttgtattatgccatgtggagacagcagatcggggagagaaaaactttggtgtagataaggtggaagttggaagcgggatgatggaagtttatatatgattgtgagattcttcgcttttgttcataatgacaattaggcttttataaaaaaataaattaccccgaatgttgatttcggggtattatttttatgaagaaatttaaaattaatctctttttctaacggttctctgctcgattcttttttcgaatttctcaccctgaaaaattctctgaatcatgattcccggaatatgaatctggttgggatccaattctcccggctctaccaattcctctacttctgcaatagtaatttttcctgctcccgccatcggatgattgaagtttcttgccgatcctttgaagataaggtttccggcgtgatctcctttccatgcttttacaattgagaagtccgcttcataagcatattccagaatgtggggttttcctttgaaatcttttacttcttttccttccgctacttccgttccgaaacctgccggtgtgtagaaagcgggaattccagcctgtgccgctctgcatttttctgccaaagttccttgtggagtaagttccacttccagttctcctgaaagcatctgtctttcgaattctgcattttctcccacataagacgaaatcatttttttgatctgtcttttgtgaagcagtaatcccaaaccgaaatcgtctactccggcgttgtttgaaatacaggttaagtcttttacatcactctctaccaaagcattaattgagttttcaggaattccgcaaagtccgaatccgcctaacattaatgtcattccgtctttaatgccttcgatggcttcctttgcattttttactcttttatctatcatgaaatattagatttttctgttggctaaatttaataatttttctcatatatccggtgttcaggattttctgatttttttcgtggtctgaaatttggatagtctacatcatcaccccacaaatatctatattatggaagcaaaaaatatttcaagaattgcactcggcgcatttttgattaccgcaggaataggacatcttactttcgcaaggaaagagtttcaggcacaggttccggaatgggttcctctggataaagatgatactgttatttattcgggagttgctgaaatcgctttaggaacggcaatgatcgcaacgcctaaaaaatacagaaaaaatatgggaagaattgttgctggatttttcgcggctgtttttcccgggaatattgcccaatacaagaacagaagggattcttttgggctgaacacggataatcagagattgggaaggctttttatgcaggctccgctgattgcatgggcactgaaatctactgatgattgatttttgaatgtcaaatattgagccacggagaatattttagcccagattgagcggcatgtctgagctctttttttgctttcggcggctgcttcgctgccgccaaaaacaaaaaaaagcgagtagcgaaagctggaaacagctccagtttgaatgatcgacaattgataattgatgagcgatgggtcaatatataattgatctgaatattaccaaaataacaaaaacggacttttctaagcccgtttgttgttttatatgaaaaatgaagtgtcttactgaatgactaattttaaggtaaataattttcttgtgtatacttttacaaaatacactcctttcggaagattttcgttgaccagagaaaaacgctggttattaacatttttcgactgatataaaaggtctccgttggcagaaagaagttctattttttcgatcggataatcacttttgatgaaagttggttcacccggttttgtaggattcggataaagcaccacatttttttctgtactttttgtttcttccgttcctaaagttgttccggttacctgaaactgaactctgtttgaaacttccgtgtaagaatcgttggtaaacatcaccatataataatttccgggtgttgcaggaactgctgttccggtgattgtttttgttccctgtgtaattccgtcaaaataagtatacgaaacaaactgatcatcgggaaccgaaatattctgaggataaattccgagccagtctttgatgattcccggagaatccgtccatgaagcggtgatattttctcctaaactgtaaaccggcttgttgatccaaagttcggttaccacatcccctactttaaagaaaactttctcgccaaccgttgtataaccatcttctaagaaatactgtgcataataatatcctttggcaagtcctgtaaaattaagcgttcccgaagccgttgtaacgtaactccactgagtagaatttatagttccgggcctgtgtcccattttataaattccgatccagtctttgtttaaattcggtccgttggagaaatttacggttacagttccgcctacaggataaacatctgaagttgtgcttaaattaactttcggacctacgtagaaattttttctcggcgtaatttccgtgtaaccattattggcaaaaaatcctgcgaaatactgacctttggcagcaattccgttcgggaaagtggctgttcctgcggtttgtccgttagtgtacataaaagcctgagaagttacggcagaaggattctgtccttttttataaattcctacccagtcctgattatttccgggaccgtctgtaaaattggcaataatgggctcgttttgaagatattctgttttgttcaaagtaaatgtagggttggaaaccacacttccggttactgtaaactgtttcacatcactccattcgctccattccatatttcggtctctgtaacgcacttttacataatagtttccgttggttattgagttggcagcaatggtcgctttggtaatgtctactcctgcatttaggtttttcgtgatatcgggagttccgtttccgtcttttccgaaccagttttcgtaatctctgtaaaattctttttcgatgatggaaaaatcggcagctttactaattaaaaactgagtggtattcagcaattctccgtttgagcttgaaaatgtacttccgtttaaagttaacggcaatgtaaccggcgccgtaaatgtattggaaatagaaggttttgcaggttttggctggtttttatagcggtggaatgtatcaatcagctcattatattttttatgataaacccctccgatggaataagattccacatctacttttcctgtgtttacatctacttccacgatttggtacgtccagtctgttaatgttttctgaacatcatcaaaatcctgttcggtcgacattccccagtactgatcccatgcaactccaccggaaataatctggtaattcggtgtatttttcaactgacctctgtggtataaatggtgatgcgctccgacgtgcattaaatactttgaagaagaggttaaaagcggaacggcactgtttcttacccacgtagaaatgtctcctacatattgttccgcctgatacggtctgtggctaagagaaatgatccagtcgaccgtagaatcgccgtttgcagcatttaatacctgttgcagccaagtcatttgcgcagaaccggtatgttcggaactcaaacttataaacaaaacatttccagcctgttgcgcatagtaattttcgtttcctgagctaacgtttttatactgaatttcatcgatgtaaaaatgtgcgtaataggaattcattcccagacttccgtatgtttcgtgatttcccactgtagtctgaatcggaagataaggcgataaattaatattttttttgaaatgaacattttcgtaatgatccaaagttcccacatctacctgatctccaaccataaaggtcaaagcaatattatctgaaggatcagaagctgcgccgaatttttcctttaattttttatacgcatttaaagttaaggtatcgtatctcggttctgctttaatctggttgtctcccatgatgagaaaacgaatttttccgttggctgttgccgcctgtcccggtaaaggaagtgttcggaaattatacaccgcagattcgctggttcctgttttaattttataataatattttgtgttgggctgaagattggcaatttttgctgtgtgataaaaataattgttgttataccctgtatctgaaaaaatattcgttgttcctgtaaaagtgacattcagattggttgggctggttccgtaaaaaacggtggtttcattattagaagaggttttccagttgatgatcatggaagttggtgtaggattttgtaagtaaggatacaaagcctgcccaaaagccatctggacgacgaaaaggaaaaagaaaaaataatgtttcatttttagtttattttttattagatttattgagattaaaaattgtatatcaatgaattatcgaaatttttattgtctgattttatattcgtgcaaaagtagaattcacatataaactgtgtctgatgggaagttgaaggaaatattaaatctgagccgaaaaacggggtgaaaatttcatgatatttaatataaaattgtttggaaaatttcaaaaatgttttgtacatttgcaacctgttattcaacctctgacgaagtccgtgtaagttgcttagctttaacattttatttattaataatggatttattaaagtacgtacaagacaagtacattacaaaaaaagaattccctgaattcaaagctggtgatacgatcactgtttactacgaaattaaagaaggacaaaaaacaagaactcagttcttcaaaggaacagttatccaattgagaggtactggttctacaaaaactttcacgatcagaaaaatgtctggtgatgtaggtgtagaaagagtattcccaatcaatatgccggctcttcaaaaaatcgaagttgacagaagaggtagagttagaagatctagaatctactatttcagagaccttagaggtaaaaaagcgagaattaaagacgctgcttacaagaagaaataattcagacaacaatacatacgaaaagagactgctaattttagcggtctctttttatttaaagtacatatttatttggagcttttcccgctttccgctgcaatctttttttttcaaaaaaaggatttttacttcaatcggggctaaaaaaggatgcattttaaaaccaccccctcaaaaatttcaggaaattttcgccacccctccagaagaggagaattttgcacaaaaaacgcatttataattttccattcctttatataaacgtctatcatgtaactttaagcttctttacttaataaattggtattgttaaattaaaatatatttaataaattagtattatgaaatgttataaatgtcaatcattagataaagtaaaagcgggttttacaagaggtttgcaaaggtataaatgcaaaaactgtggannnnnnnnnnnnnnnnnnnnnnnnnnnnnnnnnnnnnnnnnnnnnnnnnnnnnnnnnnnnnnnnnnnnnnnnnnnnnnnnnnnnnnnnnnnnnnnnnnnnacgtttttttgccatttttcagacaaagaaaaagttttatgaaacacgtttcataaaacttcctacaaacagcctaacaatgaggttttgataggattctaccaactatttttcagtattatgcctttaaaataatccactattttctgaataacaggaggttgaaaccagaaaatatctccatgtcccgcatcttttaccataacaagtttagcatcgttattttttgctttcaattgctcgaacaactggatactctgtacaggagaaacaagctgatctttggttccgtgcatgatcataaaaggaggatgtccggatttaatatgtcctacaggacttgcaaattttgctttatccagatccccgaatatagtgttgcccggagaattgtaaaatgcaggaccatgaagcaaaagagcctctgtagaagccggtgaacggtgaaatgcctttagtttttcttcatatccttctccaatattagtaagatcgcttatgccaaacatagacaccacagaagccacatcgctattctcatcaaggtattctccttcttcgaaaaaagtttcgcccattgtggttccaagcatctgaacgagatagcctcccgcagaatcgccgagaagccctatccgtaatggatcaattccaaaattttcagcatgtgcctttagatatcgtatcgctgctttaccatcaaccacaggcgcaggaaaagtatcgggtatggttctgtattctgctcctgcaactacaaaacctgcctgagctaatgcgtgtctgatttcataaaacttattataatctgctgatgtaaaaccacctccgggaaaatagagaatagccggtttcggttcgtcgtttcgcggaacaagcaccgtcatctgcaatgattttacagaacgctgagaaataatctggcggtaaacgattccggtaatcatatcaatctgtccgttactgatctcgacacagatttcttctttatcctggctgctcatctttaaggtttttagagttaaaaagaattaaaagatgtcctgtaattttcaaattcttatatcaggagttactcttgtacacttaaaaaagtgccaaacttaaaatgatattgatttaatgataattctgttgttgttacccgatgtaatttaaaaggaatgttttggtttttagcaactccaacaacataaactaacctgagttcgggataagaaataaatttagataattgatttatagaattatattaatttatcgcaaagaaaaacaaaagatttttctacttattgaaagtttgcaagctaaacaaaggcacttcgtttatttaaaaaagacaaaaatggtattactttgagaagttttacgccattgtatatcttaaaagctgaattcctgataattgaatctcattgtttacccttgcggttaagaagacttatcccgaactcaggttaaactattaaaaacagaccattaaaatcctttactttagctcagaattttgttcagaagcactacattttagttcagaatgaaactttttgaaagtctctgaataaaaaaaaccggttttgaagccggtttgttgtgaaactttgtcaaagttcttaaactttgacaaagttgatttcatttctaagttaaaaaagattctcatctacaaaattcggaagcgttactttcagattcggctccatttccatggctcttttgatggcgaaaacagcaccttcatttcttgcccagcttcgtcttgagattccgttgttcacatcccagaacagcatggattttagtcttctgtcggcatcatcgcttccgtccagcagcattccgaaaccgccgttaatcacttctccccatcctactccgcctccgttgtggatcgaaacccaggttgccccacggaaactgtcgccaatcacattgtggatcgccatatctgccgtaaatctggaaccgtcataaatattagacgtttctctgtacggcgaatctgtaccggaaacatcatgatgatctcttcccaaaacaacaggtccgatttctccgtttttaatggctttattgaaggcttctgcaattttcattcttccttcggcatcggcatataaaattcttgcctgcgaaccgaccaccagattattttcctgtgctcctttgatccactgaatattgtctttcatctgctgctggatttcttcaggggaattctgctgaatttcttctaaaaccgcacatgcaatatcatccgttttctgtagatcttccggttttccgctcgtacaaacccagcggaatggtccgaaaccgtaatcaaaacacatcggtcccataatatcctgcacataagaagggaatttaaattctcttcccaacgtaggattttccgccattacatcggctccggctctggaagattccagcaagaaggcatttccgtaatcgaagaaataggttccttttgccgtatgtttattgatggcttctgcgtgtcttcttaaactttcctgaactttatctttaaacagttccggatcttccgccatcattttattggattcttcaaagctctgtcccgcaggataatatcctcccgcccaaggattgtgaagcgaagtctggtctgaaccaatatcgattcttaaattctcctgatcaaatttttcccagacctcaacaatatttcccagatatgccagagaaacagattctttattttcctgcgcctgtcgaactcttgcaactaatgcgtcaagattttcatgaatttcgttcacccacttctgctcgtgacggattttggtaatctttggattgacttcggcacaaacggtaacacagcctgcaatatttcctgcttttggctgcgcgccggacattccgcctaatcctgaagtcacgaacagtccgcctttcggatctttattgatttttctgaacgcgttcagtaccgtaatggttgttccgtgaacaattccctgcggaccaatgtacatatagcttcccgcagtcatttgtccgtactgtgtaacgcccaaagcattgaatttctcccagtcgtccggtttggaatagttgggaatcatcattccgttcgttaccaccactctcggcgcatctttatgggaaggaaacaatcccatcggatgacctgaatacatgaccaaggtctgctnnnnnnnnnnnnnnnnnnnnnnnnnnnnnnnnnnnnnnnnnnnnnnnnnnnnnnnnnnnnnnnnnnnnnnnnnnnnnnnnnnnnnnnnnnnnnnnnnnnngttctgcatcatgagtttctgctttgaggatatcaaagtgttcaactaaaaattcaggaagtaacaatttaagaagttcttgatcgcttagcaatatacaaagataaaactacttaacattcccccaagttttgagcctgagccctgtttagtgacctatcgtaaaaatttgaaaataggtcactaaaaattcagggagacccgaccaatagacagtctaacgattgaacatcttgcaaaaagtggtaacagaaagtaaattattaaacaattaaagttagcacacaatgaacaaaacattcaacctgctattcttgtatttgttattttaaaatatataattgtttatttagttttagaaaaagcaactttaaagagttttctagcataaactgctttttagagtaacattttgttttccttttgaatctcgctagacaatgccttattctggaattatagctctcaactgtgaatgtttccgcttttgattcgcaatgtttctctgtaggaattaattctgaataactttttcaatagtcactgcaaaaaccattaatttccctgtcttttaaactgttccagagcttttgaaagtggaagtatttcttttcccacaaacaaaatcgatgtagcgctttccaaatctatcaacagcaatccagctccaacagtagtttttttattttggatgtagctgtgaatttcatctaattctactatttctataggttcttgagattttggcaaagaaaccgattctccccactttttcacccattgatataccgttccgtaactgatattcaacactctcccaatagcccgaaatcccattccttccaaatacatttctaatgcaagccgtctttgctcaggactttttacatccgatttgctttcaacactataaaagcatccacagtttttgcatttatacctttgtaaacctcttgtaaaacccgcttttactttatctaatgattgacatttataacatttcataatactaattaatgaaatatattttaatttaacaataccaaggtcaacaagatgaagctctcaaacatttggaactttcacgtgatattttgctcaataatcaggattatgggtcattgacaattgtttatttttatttgggaaaactatattggctaaaaggaaacaaaaccgaatcactgcattatctaaacaaagtggattctctggttagcaaattcatgtttatgtctcctgaaattcgttcaaattatcaatacctcattgcagatgctaaacaaaatggtgactcaaaaggtattcatattttgttcatcgtttgctaaaagctgactcagaagaaaatgatgagcttccaatgatgttatcaaaaattaatcaagcatacgacaatgatggcttatcgagagaaaatcaattattagagaataagaatcaaaatctttcatacctattcttacttattcccgttggacttattttatcaatttatttactgtctttttggcgacgggtaaaagaaagaaagattactgaaaaatataatgaaatactgaaaaagttcaacgagcgaaattctattttaaaaaccgaacaaatccctgacaataaaactgaacaaaaaaaagagccatacagttccgaaattatagaggacatcaaagtaaaacttaaaaaatttgaagaagataaactgtttcttgccaaaaacctgaccttaccaaaggttgcaaaaatgctgggtagaaaccattcccaactgtcttatgttctcaatgaacatttaggcatatctttcactcattatctaaagactttacgaattggatatattaccaaccttctagtggaaaataaattgtatctgcaatacaaagttgaaaacttggctcacgaatgcggaatgtccagccgacagttattctcaactcatttttttgaaattaacggaataagaccgatagaatttatacgggggagagaataaaggaaaatgaagagaaataataagctattatcaagaaatatctgcgaaataaaaatgaagttttttcatagcaattattctatatgatatttgtatttttgaaataggacaacattcagttttattacattctaaattaataatctgattatttccatatattaaaaaaaaatcatggaaatagactaaatttttatcagtcatgcaacattcccacaagataatgaattttcaatttggttggcatctcgcttagaaatgttaggctataaagtttggcttgataaagaggtattgttaggaggagagcgtttttgggctacaatccaaaaagcaataaatagctcggcaaaaattctttttgtgtattctaaaaatgttattacctccgaaggtattttgagaagcggaattgaagatgagatagaatacagtaaaagcattgcatccgaaaataaattaaatgattttattataccactgcaaattgatgattcgaagtataatcttgcgataggaatatctaatataaatcaaattttctttaatgataactgggcagatggacttaaacagctaaaaaagaaattggaaaaagataatgttccacaagtacttgattctactcaatcagtaatgtcggagtggtacgagaatgagtatatttctaattgtaagattatagaaaaaaaggaattgttttacacttcatggtggtctgttaaagatattcctaataagttctatatgtatcagtttgctaataaggatcaagcaacggaggttaaaaaaagtaatccaaatatttcaataagtcaaatagctaatgttctttcttgttttgatagcaatcttaatcttaaggttgttaaagatgctgatgaatttgaaatttatcctgagaaaaaatttaaattcacttctgatgaaatattgagctcatttaaactttttacttttcttaagtccaatcacaataaacgcgatataatttaaatctttccaactgattacagttgtgtcatatctgttcaggagtgatctgaagctgtccagccaagcgtttgttctttcaatagagtatctttctttgtaaagttccggatcgaagtagatatcatcttctattgttttgct

SEQ ID NO: 3 - DNA, 1425 bp, Artificial Sequence
  16S rRNA gene sequence of SEQ ID NO:1
gtggaatgcggcagcttacacatgcagtcgaggggtatatgtcttcggatagtagagaccggcgcacgggtgcgtaacgcgtatgcaatctaccttttacagagggatagcccagagaaatttggattaatacctcatagcatagcagtctcgcatgagatcactattaaagtcacaacggtaaaagatgagcatgcgtcccattagctagttggtaaggtaacggcttaccaaggctacgatgggtaggggtcctgagagggagatcccccacactggtactgagacacggaccagactcctacgggaggcagcagtgaggaatattggacaatgggcgcaagcctgatccagccatgccgcgtgcaggatgacggtcctatggattgtaaactgcttttgtacgagaagaaacaccccgacgtgtcgggacttgacggtatcgtaagaataaggatcggctaactccgtgccagcagccgcggtaatacggaggatccaagcgttatccggaatcattgggtttaaagggtccgtaggcggtttagtaagtcagtggtgaaagcccatcgctcaacggtggaacggccattgatactgctaaacttgaattattaggaagtaactagaatatgtagtgtagcggtgaaatgcttagagattacatggaataccaattgcgaaggcaggttactactaatggattgacgctgatggacgaaagcgtgggtagcgaacaggattagataccctggtagtccacgccgtaaacgatggatactagctgttggaagcaatttcagtggctaagcgaaagtgataagtatcccacctggggagtacgttcgcaagaatgaaactcaaaggaattgacgggggcccgcacaagcggtggagcatgtggtttaattcgatgatacgcgaggaaccttaccaaggcttaaatgtagtttgaccgatttggaaacagatctttcgcaagacaaattacaaggtgctgcatggttgtcgtcagctcgtgccgtgaggtgtcaggttaagtcctataacgagcgcaacccctgttgttagttgccagcgagtcaagtcgggaactctaacaagactgccagtgcaaactgtgaggaaggtggggatgacgtcaaatcatcacggcccttacgccttgggctacacacgtgctacaatggccggtacagagagcagccactgggtgaccaggagcgaatctataaaaccggtcacagttcggatcggagtctgcaactcgactccgtgaagctggaatcgctagtaatcggatatcagccatgatccggtgaatacgttcccgggccttgtacacaccgcccgtcaagccatggaagctgggggtgcctgaagtcggtgaccgcaaggagctgcctagggtaaaactatcttcct

SEQ ID NO: 4 - DNA, 1450 bp, Artificial sequence
  16S rRNA gene sequence of SEQ ID NO:2
cgagcggtattgtttcttcggaaacgagagagcggcgcacgggtgcggaacacgtgtgcaacctgcctttatctgggggatagcctttcgaaaggaagattaataccccataatattttgaatggcatcatttgaaattgaaaactccggtggatagagatgggcacgcgcaagattagatagttggtagggtaacggcctaccaagtcaatgatctttagggggcctgagagggtgatcccccacactggtactgagacacggaccagactcctacgggaggcagcagtgaggaatattggacaatgggtgagagcctgatccagccatcccgcgtgaaggacgacggccctatgggttgtaaacttcttttgtacagggataaacctttccacgtgtggaaagctgaaggtactgtacgaataagcaccggctaactccgtgccagcagccgcggtaatacggagggtgcaagcgttatccggatttattgggtttaaagggtccgtaggcggatccgtaagtcagtggtgaaatctcatagcttaactatgaaactgccattgatactgcgggtcttgagtaaggtagaagtagctggaataagtagtgtagcggtgaaatgcatagatattacttagaacaccaattgcgaaggcaggttactatgtcttaactgacgctgatggacgaaagcgtggggagcgaacaggattagataccctggtagtccacgccgtaaacgatgctaactcgtttttgggctttcgggttcagagactaagcgaaagtgataagttagccacctggggagtacgaacgcaagtttgaaactcaaaggaattgacgggggcccgcacaagcggtggattatgtggtttaattcgatgatacgcgaggaaccttaccaagacttaaatgggaattgatcggtttagaaatagaccttccttcgggcaattttcaaggtgctgcatggttgtcgtcagctcgtgccgtgaggtgttaggttaagtcctgcaacgagcgcaacccctgtcactagttgccatcattcagttggggactctagtgagactgcctacgcaagtagagaggaaggtggggatgacgtcaaatcatcacggcccttacgtcttgggccacacacgtaatacaatggccggtacagagggcagctacacagcgatgtgatgcaaatctcgaaagccggtctcagttcggattggagtctgcaactcgactctatgaagctggaatcgctagtaatcgcgcatcagccatggcgcggtgaatacgttcccgggccttgtacacaccgcccgtcaagccatggaagtctggggtacctgaagtcggtgaccgtaacaggagctgcctagggtaaaacaggtaactagggctaagtcgtaacaaggtagccgtaccggaaggtgcggctggaacatct

SEQ ID NO: 5 - DNA, 1436 bp, Artificial Sequence
  16S rRNA gene sequence of bacterial strain ATCC BAA-2541
gatgaacgctagcggcaggcttaacacatgcaagtcgaggggtatatgtcttcggatatagagaccggcgcacgggtgcgtaacgcgtatgcaatctaccttttacagagggatagcccagagaaatttggattaatacctcatagtatagtgactcggcatcgagatactattaaagtcacaacggtaaaagatgagcatgcgtcccattagctagttggtaaggtaacggcttaccaaggctacgatgggtaggggtcctgagagggagatcccccacactggtactgagacacggaccagactcctacgggaggcagcagtgaggaatattggacaatgggcgcaagcctgatccagccatgccgcgtgcaggatgacggtcctatggattgtaaactgcttttgtacgagaagaaacactccaacgtgttggagcttgacggtatcgtaagaataaggatcggctaactccgtgccagcagccgcggtaatacggaggatccaagcgttatccggaatcattgggtttaaagggtccgtaggcggtttagtaagtcagtggtgaaagcccatcgctcaacggtggaacggccattgatactgctaaacttgaattattaggaagtaactagaatatgtagtgtagcggtgaaatgcttagagattacatggaataccaattgcgaaggcaggttactactaatggattgacgctgatggacgaaagcgtgggtagcgaacaggattagataccctggtagtccacgccgtaaacgatggatactagctgttgggagcaatctcagtggctaagcgaaagtgataagtatcccacctggggagtacgttcgcaagaatgaaactcaaaggaattgacgggggcccgcacaagcggtggagcatgtggtttaattcgatgatacgcgaggaaccttaccaaggcttaaatgtagtttgaccgatttggaaacagatctttcgcaagacaaattacaaggtgctgcatggttgtcgtcagctcgtgccgtgaggtgtcaggttaagtcctataacgagcgcaacccctgttgttagttgccagcgagtcaagtcgggaactctaacaagactgccagtgcaaactgtgaggaaggtggggatgacgtcaaatcatcacggcccttacgccttgggctacacacgtgctacaatggccggtacagagagcagccactgggcgaccaggagcgaatctataaaaccggtcacagttcggatcggagtctgcaactcgactccgtgaagctggaatcgctagtaatcggatatcagccatgatccggtgaatacgttcccgggccttgtacacaccgcccgtcaagccatggaagctgggggtgcctgaagtcggtgaccgcaaggagctgcctagggtaaaactggtaactagggct

SEQ ID NO: 6 - DNA, 1505 bp, Artificial Sequence
  16S rRNA gene sequence of bacterial strain CCUG 51329
agagtttgatcctggctcaggatgaacgctagcgggaggcctaacacatgcaagccgagcggtattgtttcttcggaaacgagagagcggcgcacgggtgcggaacacgtgtgcaacctgcctttatctgggggatagcctttcgaaaggaagattaataccccataatattttgaatggcatcatttaaaattgaaaactccggtggatagagatgggcacgcgcaagattagatagttggtagggtaacggcctaccaagtcagtgatctttagggggcctgagagggtgatcccccacactggtactgagacacggaccagactcctacgggaggcagcagtgaggaatattggacaatgggtgagagcctgatccagccatcccgcgtgaaggacgacggccctatgggttgtaaacttcttttgtacagggataaacctttccacgtgtggaaagctgaaggtactgtacgaataagcaccggctaactccgtgccagcagccgcggtaatacggagggtgcaagcgttatccggatttattgggtttaaagggtccgtaggcggatccgtaagtcagtggtgaaatctcatagcttaactatgaaactgccattgatactgcgggtcttgagtaaggtagaagtagctggaataagtagtgtagcggtgaaatgcatagatattacttagaacaccaattgcgaaggcaggttactatgtcttaactgacgctgatggacgaaagcgtggggagcgaacaggattagataccctggtagtccacgccgtaaacgatgctaactcgtttttgggctttcgggttcagagactaagcgaaagtgataagttagccacctggggagtacgaacgcaagtttgaaactcaaaggaattgacgggggcccgcacaagcggtggattatgtggtttaattcgatgatacgcgaggaaccttaccaagacttaaatgggaattgatcggtttagaaatagaccttccttcgggcaattttcaaggtgctgcatggttgtcgtcagctcgtgccgtgaggtgttaggttaagtcctgcaacgagcgcaacccctgtcactagttgccatcattcagttggggactctagtgagactgcctacgcaagtagagaggaaggtggggatgacgtcaaatcatcacggcccttacgtcttgggccacacacgtaatacaatggccggtacagagggcagctacacagcgatgtgatgcaaatctcgaaagccggtctcagttcggattggagtctgcaactcgactctatgaagctggaatcgctagtaatcgcgcatcagccatggcgcggtgaatacgttcccgggccttgtacacaccgcccgtcaagccatggaagtctggggtacctgaagtcggtgaccgtaacaggagctgcctagggtaaaacaggtaactagggctaagtcgtaacaaggtagccgtaccggaaggtgcggctggaacatct

SEQ ID NO: 7 - DNA, 20 bp, Artificial Sequence
  universal primer pair for the Domain bacteria 8f
agagtttgatcctggctcag

SEQ ID NO: 8 - DNA, 19 bp, Artificial Sequence
  universal primer pair for the Domain bacteria 1492r
ggttaccttgttacgactt

SEQ ID NO: 9 - DNA, 20 bp, Artificial Sequence
  vector primers gemsp6
gctgcgacttcactagtgat

SEQ ID NO: 10 - DNA, 19 bp, Artificial Sequence
  vector primers gemt7
gtggcagcgggaattcgat

SEQ ID NO: 11 - DNA, 17 bp, Artificial Sequence
  Primers Bakt_341F
  misc_feature (9)..(9): n is a, c, g or t
  misc_feature (13)..(13): w is a or t
cctacgggnggcwgcag

SEQ ID NO: 12 - DNA, 21 bp, Artificial Sequence
  Primers Bakt_805R
gactachvgggtatctaatcc

SEQ ID NO: 13 - DNA, 20 bp, Artificial Sequence
  primers specific for the chromosomal 16S region 27F
agagtttgatcctggctcag

SEQ ID NO: 14 - DNA, 19 bp, Artificial Sequence
  primers specific for the chromosomal 16S region 1492R
ggttaccttgttacgactt
